(19) United States
(12) Patent Application Publication
(10) Pub. No.: US 2024/0398990 A1
(43) Pub. Date: Dec. 5, 2024

(54) LIVER-SPECIFIC EXPRESSION CASSETTES, VECTORS AND USES THEREOF FOR EXPRESSING THERAPEUTIC PROTEINS

(71) Applicant: Generation Bio Co., Cambridge, MA (US)

(72) Inventors: Jessica Lynn Keenan, Cambridge, MA (US); Russell Monds, Cambridge, MA (US); Elizabeth Majumdar, Cambridge, MA (US); Jicong Cao, Cambridge, MA (US)

(21) Appl. No.: 18/690,020

(22) PCT Filed: Sep. 16, 2022
(86) PCT No.: PCT/US2022/043884

§ 371 Date: Mar. 7, 2024

Related U.S. Application Data
(60) Provisional application No. 63/245,013, filed on Sep. 16, 2021.

(51) Int. Cl. A61K 48/00; C07K 14/755; C12N 15/85

(52) U.S. Cl. CPC A61K 48/0058; C07K 14/755; C12N 15/85; C12N 2830/008

(57) ABSTRACT

The present disclosure provides liver-specific expression cassettes, vectors comprising the expression cassettes, and uses in gene therapy, particularly liver-directed gene therapy.

### RELATED APPLICATIONS

[0001] This application claims priority to U.S. Provisional Application No. 63/245,013, filed on Sep. 16, 2021, the contents of which is hereby incorporated by reference in its entirety.

### BACKGROUND

[0002] Gene therapy aims to improve clinical outcomes for patients suffering from either genetic mutations or acquired diseases caused by an aberration in the gene expression profile. Gene therapy includes the treatment or prevention of medical conditions resulting from defective genes or abnormal regulation or expression, e.g., underexpression or overexpression, that can result in a disorder, disease, malignancy, etc. For example, a disease or disorder caused by a defective gene might be treated, prevented or ameliorated by delivery of a corrective genetic material to a patient, or might be treated, prevented or ameliorated by altering or silencing a defective gene, e.g., with a corrective genetic material to a patient resulting in the therapeutic expression of the genetic material within the patient.

[0003] The basis of gene therapy is to supply a transcription cassette with an active gene product (sometimes referred to as a transgene), e.g., that can result in a positive gain-of-function effect, a negative loss-of-function effect, or another outcome. Such outcomes can be attributed to expression of a therapeutic protein such as an antibody, a functional enzyme, or a fusion protein. Gene therapy can also be used to treat a disease or malignancy caused by other factors. Human monogenic disorders can be treated by the delivery and expression of a normal gene to the target cells. Delivery and expression of a corrective gene in the patient's target cells can be carried out via numerous methods, including the use of engineered viruses and viral gene delivery vectors.

[0004] The liver is directly or indirectly involved in many essential processes and is affected by numerous inherited diseases. Therefore, many inherited diseases could be effectively treated by targeting the liver, using gene transfer approaches. However, there are challenges that remain associated with liver-directed gene therapy, including efficiently targeting hepatocytes, maintaining stability of the vector genome, and achieving persistent high level expression. Among the many virus-derived vectors available (e.g., recombinant retrovirus, recombinant lentivirus, recombinant adenovirus, and the like), recombinant adeno-associated virus (rAAV) has gained popularity as a versatile vector in gene therapy. Liver-directed gene therapy clinical trials with AAV vectors have reported clinical efficacy data (Rodriguez-Marquez et al., Expert Opinion on Biological Therapy Volume 21, 2021—Issue 6). While clinical advances have been made using rAAV vectors for Factor IX (FIX) expression in the liver, the use of rAAV for FVIII expression in hemophilia A patients has been challenging due to ineffective biosynthesis of human FVIII (hFVIII). rAAV vectors produce capsids that have limited space to encapsulate nucleic acids. FVIII is a large glycoprotein, and the rAAV sequences necessary to encode and express FVIII generally exceed the packaging capacity of the capsid.

[0005] Recombinant capsid-free AAV vectors can be obtained as an isolated linear nucleic acid molecule comprising an expressible transgene and promoter regions flanked by two wild-type AAV inverted terminal repeat sequences (ITRs) including the Rep binding and terminal resolution sites. These recombinant AAV vectors are devoid of AAV capsid protein encoding sequences, and can be single-stranded, double-stranded or duplex with one or both ends covalently linked through the two wild-type ITR palindrome sequences (e.g., WO2012/123430, U.S. Pat. No. 9,598,703). They avoid many of the problems of AAV-mediated gene therapy in that the transgene capacity is much higher, transgene expression onset is rapid, and the patient immune system recognizes the DNA molecules as a virus to be cleared.

[0006] Non-viral gene therapy is assumed to be less toxic for the host and safer in terms of gene delivery compared to a viral vector. One example of a non-viral gene therapy, closed-ended DNA (“ceDNA”) vectors, has many attractive features for gene-based therapy. For example, ceDNA vectors have no packaging constraints imposed by the limiting space within the viral capsid. ceDNA vectors represent a viable eukaryotically-produced alternative to prokaryote-produced plasmid DNA vectors, as opposed to encapsulated AAV genomes. This permits the insertion of control elements, e.g., large transgenes, multiple transgenes, regulatory switched, and incorporation of the native genetic regulatory elements of the transgene, if desired.

[0007] In most living organisms, and especially in eukaryotes with large genome sizes, however, there does not appear to be a driving force to limit enhancer/promoter size, and therefore most endogenous enhancer/promoters span hundreds, and more often thousands, of base pairs (bp) of DNA. Due to their size, these endogenous natural gene enhancers/promoters are generally not amenable to inclusion in gene therapy products due to size limitations.

[0008] Regardless of viral or non-viral delivery, there remains a need for a technology that permits robust expression of a therapeutic protein, such as a liver-specific therapeutic protein, in a cell, tissue or subject, to improve the efficiency and safety of treatment of a genetic disease or disorder.

### SUMMARY

[0009] The present disclosure has applied a range of bioinformatic analyses to identify a novel and inventive set of non-natural modifications to a native liver-specific Serpin enhancer region that surprisingly resulted in acute expression level and improved sequence characteristics known to impact expression durability of gene product.

[0010] The disclosure also provides an evolutionary conservation analysis to selective removal of CpGs in the enhancer without disrupting function. Enhancers are often combined in series to drive higher levels of transcription initiation. However, the principals underlying optimal number and orientation of enhancer regions remain not well understood. Spacing between transcription factor binding sites is likely a key selection attribute that impacts function, especially considering that DNA is a helix such that number of nucleotides between binding sites also changes their rotational spatial orientation. As described herein, a range of enhancer combinations were tested for improved function, including different numbers of enhancers and nucleotide spacer content. Bioinformatic analysis was used to guide the sequence selection of sequence substitutions tested.

[0011] The technology described herein relates to liver-specific nucleic acid expression cassettes comprising specific regulatory elements (enhancer-promoter combination) that have been improved to enhance liver-specific gene expression, such that the native cis-regulatory region has been optimized to minimize CpG content and to enhance spacer optimization, and a vector, either a viral vector (e.g., an AAV-based vector), or a non-viral vector (e.g., a ceDNA vector).

[0012] As disclosed herein, the liver-specific expression cassette surprisingly promotes substantially increased protein expression in the liver and in liver cells than in other tissue types, while retaining tissue specificity. In some embodiments, the liver-specific regulatory elements (e.g., enhancer-promoter combination) can be included in a viral vector (such as an adeno-associated virus vector (AAV)) or a non-viral vector a capsid-free (e.g., non-viral) DNA vector with covalently-closed ends (referred to herein as a “closed-ended DNA vector” or a “ceDNA vector”) in operative combination with a heterologous nucleic acid sequence encoding a protein of interest to promote expression of the protein of interest, for example, in liver tissue and/or cells. An advantage of the promoters of the present disclosure is that the enhancer-promoters can be designed and selected for the amount of expression of gene product by the vector, while also ensuring that the amount of promoter is not immunogenic. In some embodiments, the vector (e.g., the AAV vector or ceDNA vector) provides effective expression of the protein of interest at doses that are not predicted to cause immunogenicity in humans. In some embodiments, the vector (e.g., the AAV vector or ceDNA vector) provides effective expression of the protein of interest at doses that are not predicted to cause toxicity in humans. The improvements described herein can be generalized to the improved expression of any transgene (e.g., AAV, ceDNA).

[0013] In a first aspect, the disclosure relates to a liver-specific nucleic acid regulatory element comprising a nucleic acid sequence having at least 93% identity to any one of SEQ ID NOs: 1-80, 138 or 139. In one embodiment, the nucleic acid sequence has at least 94% identity to any one of SEQ ID NOs: 1-80, 138 or 139. In one embodiment, the nucleic acid sequence has at least 95% identity to any one of SEQ ID NOs: 1-80, 138 or 139. In one embodiment, the nucleic acid sequence has at least 96% identity to any one of SEQ ID NOs: 1-80, 138 or 139. In one embodiment, the nucleic acid sequence has at least 97% identity to any one of SEQ ID NOs: 1-80, 138 or 139. In one embodiment, the nucleic acid sequence has at least 98% identity to any one of SEQ ID NOs: 1-80, 138 or 139. In one embodiment, the nucleic acid sequence has at least 99% identity to any one of SEQ ID NOs: 1-80, 138 or 139. In one embodiment, the nucleic acid consists of any one of SEQ ID NOs: 1-80, 138 or 139. In one embodiment, the nucleic acid sequence comprises any one of SEQ ID NOs: 1-80, 138 or 139.

[0014] In a first aspect, the disclosure relates to a liver-specific nucleic acid regulatory element comprising a nucleic acid sequence having at least 95% identity to SEQ ID NO: 131. In one embodiment, the nucleic acid sequence has at least 96% identity to SEQ ID NO: 131. In one embodiment, the nucleic acid sequence has at least 97% identity to SEQ ID NO: 131. In one embodiment, the nucleic acid sequence has at least 98% identity to SEQ ID NO: 131. In one embodiment, the nucleic acid sequence has at least 99% identity to SEQ ID NO: 131. In one embodiment, the nucleic acid sequence comprises SEQ ID NO: 131. In one embodiment, the nucleic acid sequence consists of SEQ ID NO: 131.

[0015] In a first aspect, the disclosure relates to a liver-specific nucleic acid regulatory element comprising a nucleic acid sequence having at least 95% identity to SEQ ID NO: 122. In one embodiment, the nucleic acid sequence has at least 96% identity to SEQ ID NO: 122. In one embodiment, the nucleic acid sequence has at least 97% identity to SEQ ID NO: 122. In one embodiment, the nucleic acid sequence has at least 98% identity to SEQ ID NO: 122. In one embodiment, the nucleic acid sequence has at least 99% identity to SEQ ID NO: 122. In one embodiment, the nucleic acid sequence comprises SEQ ID NO: 122. In one embodiment, the nucleic acid consists of SEQ ID NO: 122.

[0016] In a first aspect, the disclosure relates to a liver-specific nucleic acid regulatory element comprising a nucleic acid sequence having at least 95% identity to SEQ ID NO: 81. In one embodiment, the nucleic acid sequence has at least 96% identity to SEQ ID NO: 81. In one embodiment, the nucleic acid sequence has at least 97% identity to SEQ ID NO: 81. In one embodiment, the nucleic acid sequence has at least 98% identity to SEQ ID NO: 81. In one embodiment, the nucleic acid sequence has at least 99% identity to SEQ ID NO: 81. In one embodiment, the nucleic acid sequence comprises SEQ ID NO: 81. In one embodiment, the nucleic acid consists of SEQ ID NO: 81.

[0017] In a first aspect, the disclosure relates to a liver-specific nucleic acid regulatory element comprising a nucleic acid sequence having at least 95% identity to SEQ ID NO: 82. In one embodiment, the nucleic acid sequence has at least 96% identity to SEQ ID NO: 82. In one embodiment, the nucleic acid sequence has at least 97% identity to SEQ ID NO: 82. In one embodiment, the nucleic acid sequence has at least 98% identity to SEQ ID NO: 82. In one embodiment, the nucleic acid sequence has at least 99% identity to SEQ ID NO: 82. In one embodiment, the nucleic acid sequence comprises SEQ ID NO: 82. In one embodiment, the nucleic acid consists of SEQ ID NO: 82.

[0018] In a first aspect, the disclosure relates to a liver-specific nucleic acid regulatory element comprising a nucleic acid sequence having at least 95% identity to SEQ ID NO: 83. In one embodiment, the nucleic acid sequence has at least 96% identity to SEQ ID NO: 83. In one embodiment, the nucleic acid sequence has at least 97% identity to SEQ ID NO: 83. In one embodiment, the nucleic acid sequence has at least 98% identity to SEQ ID NO: 83. In one embodiment, the nucleic acid sequence has at least 99% identity to SEQ ID NO: 83. In one embodiment, the nucleic acid sequence comprises SEQ ID NO: 83. In one embodiment, the nucleic acid consists of SEQ ID NO: 83.

[0019] In another aspect, disclosed herein is a liver-specific nucleic acid regulatory element consisting essentially of a nucleic acid sequence set forth in any one of Table 10, Table 11, Table 12, or Table 13.

[0020] In another aspect, disclosed herein is a liver-specific nucleic acid regulatory element comprising a nucleic acid sequence set forth in any one of Table 10, Table 11, Table 12, or Table 13.

[0021] In another aspect, disclosed herein is a liver-specific nucleic acid regulatory element comprising a nucleic acid sequence having at least 93%, at least 94%, at least 95%, at least 96%, at least 97%, at least 98%, at least 99% identity to a sequence set forth in any one of Table 10, Table 11, Table 12, or Table 13.

[0022] In one embodiment, the element comprises at least two nucleic acid sequences set forth in any one of Table 10, Table 11, Table 12, or Table 13. In one embodiment, the two nucleic acid sequences are identical. In one embodiment, the element comprises three (3) nucleic acid sequences set forth in any one of Table 10, Table 11, Table 12, or Table 13, optionally wherein the three sequences are identical. In one embodiment, the element consists essentially of two (2) to ten (10) nucleic acid sequences set forth in any one of Table 10, Table 11, Table 12, or Table 13.

[0023] In one embodiment, the element comprises a spacer placed between the nucleic acid sequences set forth in any one of Table 10, Table 11, Table 12, or Table 13. In one embodiment, the spacer is at least 2, 3, 4, 5, 6, 7, 8, 9, 10, 11, 12, 13, 14, or 15 base pairs long.

[0024] In one embodiment, the element comprises a nucleic acid sequence at least 95%, 96%, 97%, 98% or 99% identical to:

(SEQ ID NO: 223)
GGGGGAGGCTGCTGGTGAATATTAACCAAGGTCACCCCAGTTATCGGAGG
AGCAAACAGGGGCAAAGTCCAC,
(SEQ ID NO: 1381)
GGGGGAAGCTACTGGTGAATATTAACCAAGGTCACCCAGTTATCAGGGAG
CAAACAGGAGCAAAGTCCAT,
(SEQ ID NO: 1073)
GGAGGCTGTTGGTGAATATTAACCAAGGTCACCTCCGTTATCGGAGGAGC
AAACAAGGGCTAAGTCCAC,
or
(SEQ ID NO: 1113)
GGAGGCTGTTGGTGAATATTAACCAAGGTCACCTCAGTTATCGGAGGAGC
AAACAAGGGCAAAGTCCAC.

[0025] In one embodiment, the element comprises a nucleic acid consisting of:

(SEQ ID NO: 223)
GGGGGAGGCTGCTGGTGAATATTAACCAAGGTCACCCCAGTTATCGGAGG
AGCAAACAGGGGCAAAGTCCAC,
(SEQ ID NO: 1381)
GGGGGAAGCTACTGGTGAATATTAACCAAGGTCACCCAGTTATCAGGGAG
CAAACAGGAGCAAAGTCCAT,
(SEQ ID NO: 1073)
GGAGGCTGTTGGTGAATATTAACCAAGGTCACCTCCGTTATCGGAGGAGC
AAACAAGGGCTAAGTCCAC,
or
(SEQ ID NO: 1113)
GGAGGCTGTTGGTGAATATTAACCAAGGTCACCTCAGTTATCGGAGGAGC
AAACAAGGGCAAAGTCCAC

[0026] In another aspect, the disclosure relates to a liver-specific nucleic acid regulatory element comprising a nucleic acid sequence having at least 85% identity to any one of SEQ ID NOs: 81, 82, 122, 83 or 85. In one embodiment, the nucleic acid sequence has at least 90% identity to any one of SEQ ID NOs: 81, 82, 122, 83 or 85. In one embodiment, the nucleic acid sequence has at least 91% identity to any one of SEQ ID NOs: 81, 82, 122, 83 or 85. In one embodiment, the nucleic acid sequence has at least 92% identity to any one of SEQ ID NOs: 81, 82, 122, 83 or 85. In one embodiment, the nucleic acid sequence has at least 93% identity to any one of SEQ ID NOs: 81, 82, 122, 83 or 85. In one embodiment, the nucleic acid sequence has at least 94% identity to any one of SEQ ID NOs: 81, 82, 122, 83 or 85. In one embodiment, the nucleic acid sequence has at least 95% identity to any one of SEQ ID NOs: 81, 82, 122, 83 or 85. In one embodiment, the nucleic acid sequence has at least 96% identity to any one of SEQ ID NOs: 81, 82, 122, 83 or 85. In one embodiment, the nucleic acid sequence has at least 97% identity to any one of SEQ ID NOs: 81, 82, 122, 83 or 85. In one embodiment, the nucleic acid sequence has at least 98% identity to any one of SEQ ID NOs: 81, 82, 122, 83 or 85. In one embodiment, the nucleic acid sequence has at least 99% identity to any one of SEQ ID NOs: 81, 82, 122, 83 or 85. In one embodiment, the nucleic acid sequence comprises any one of SEQ ID NOs: 81, 82, 122, 83 or 85. In one embodiment, the nucleic acid sequence consists of any one of SEQ ID NOs: 81, 82, 122, 83 or 85.

[0027] In another aspect, the disclosure provides a liver-specific expression cassette comprising at least one liver-specific regulatory element of any one of the aspects and embodiments herein. In one embodiment, the liver-specific expression cassette further comprises a liver-specific promoter operably linked to a transgene. In one embodiment, two or more nucleotides separate each liver-specific nucleic acid regulatory element. In one embodiment, 5 or more nucleotides separate each liver-specific nucleic acid regulatory element. In one embodiment, 10 or more nucleotides separate each liver-specific nucleic acid regulatory element. In one embodiment, 15 or more nucleotides separate each liver-specific nucleic acid regulatory element. In one embodiment, 20 or more nucleotides separate each liver-specific nucleic acid regulatory element. In one embodiment, 25 or more nucleotides separate each liver-specific nucleic acid regulatory element. In one embodiment, between 2 and 30 nucleotides separate each liver-specific regulatory element, e.g., 2, 3, 4, 5, 6, 7, 8, 9, 10, 11, 12, 13, 14, 15, 15, 17, 18, 19, 20, 21, 22, 23, 24, 25, 26, 27, 28, 29 or 30 nucleotides.

[0028] In another aspect, the disclosure provides a liver-specific expression cassette comprising at least three repeats of a liver-specific nucleic acid regulatory element and a liver-specific promoter operably linked to a transgene, wherein the liver-specific nucleic acid regulatory element comprises a nucleic acid sequence having at least 95% identity to any one of SEQ ID NOs: 81-137, and wherein two or more nucleotides separate each liver-specific nucleic acid regulatory element.

[0029] In one embodiment, between 2 and 30 nucleotides separate each regulatory element. In one embodiment, between 2 and 10, between 5 and 15, between 10 and 15, between 10 and 20, between 15 and 25, between 20 and 30 or between 25 and 30 nucleotides separate each regulatory element. In one embodiment, 5 nucleotides separate each regulatory element. In one embodiment, 11 nucleotides separate each regulatory element. In one embodiment, 30 nucleotides separate each regulatory element. In one embodiment, the liver-specific expression cassette comprises two, three, four, or five repeats of the liver-specific nucleic acid regulatory element. In one embodiment, the liver-specific expression cassette comprises six, seven, eight, nine or ten repeats of the liver-specific nucleic acid regulatory element. In one embodiment, liver-specific expression cassette comprises one or more FOXA and HNF4 transcription factor consensus sites. In one embodiment, the liver-specific nucleic acid regulatory element comprises one or more sites of CpG minimization. In one embodiment, the liver-specific promoter is selected from the group consisting of: a transthyretin (TTR) promoter, minimal TTR promotor (TTRm), an AAT promoter, an albumin (ALB) promotor or minimal promoter, an apolipoprotein A1 (APOA1) promoter or minimal promoter, a complement factor B (CFB) promoter, a ketohexokinase (KHK) promoter, a hemopexin (HPX) promoter or minimal promoter, a nicotinamide N-methyltransferase (NNMT) promoter or minimal promoter, a carboxylesterase 1 (CES1) promoter or minimal promoter, a protein C (PROC) promoter or minimal promoter, an apolipoprotein C3 (APOC3) promoter or minimal promoter, a mannan-binding lectin serine protease 2 (MASP2) promoter or minimal promoter, a hepcidin antimicrobial peptide (HAMP) promoter or minimal promoter, and a serpin peptidase inhibitor, clade C (antithrombin), member 1 (SERPINC1) promoter or minimal promoter. In one embodiment, the promoter comprises any sequence from Table 1. In one embodiment, the liver-specific promoter is a TTR promoter or a TTRm promoter. In one embodiment, the transgene encodes a liver-specific therapeutic protein. In one embodiment, the liver-specific therapeutic protein is coagulation factor VIII (FVIII). In one embodiment, the coagulation FVIII comprises a codon optimized nucleic acid sequence. In one embodiment, the coagulation FVIII comprises a nucleic acid sequence having at least 90%, 91%, 92%, 93%, 94%, 95%, 96%, 97%, 98%, 99% identity to, comprises, or consists of SEQ ID NO: 143.

[0030] In another aspect, the disclosure provides a vector comprising the liver-specific nucleic acid regulatory element of any one of the aspects or embodiments herein or the liver-specific expression cassette according to any one of the aspects or embodiments herein. In one embodiment, the vector is a viral vector or a non-viral vector. In one embodiment, the vector is a plasmid. In one embodiment, the vector is a closed-ended DNA (ceDNA) vector.

[0031] In another aspect, the disclosure provides a pharmaceutical composition comprising the liver-specific expression cassette according to any one of the aspects or embodiments herein or the vector according to any one of the aspects or embodiments herein, and a pharmaceutically acceptable excipient.

[0032] In another aspect, the disclosure provides a method of treating a liver-specific disease or disorder comprising transduction or transfection of the vector according to any one of the aspects and embodiments herein, or the pharmaceutical composition of the aspects or embodiments herein, into a subject. In one embodiment, the subject is a human subject suffering from a genetic disorder. In one embodiment, the subject has hemophilia A. In one embodiment, the genetic disorder is selected from the group consisting of sickle-cell anemia, melanoma, hemophilia A (clotting factor VIII (FVIII) deficiency) and hemophilia B (clotting factor IX (FIX) deficiency), cystic fibrosis (CFTR), familial hypercholesterolemia (LDL receptor defect), hepatoblastoma, Wilson disease, phenylketonuria (PKU), congenital hepatic porphyria, inherited disorders of hepatic metabolism, Lesch Nyhan syndrome, sickle cell anemia, thalassaemias, xeroderma pigmentosum, Fanconi's anemia, retinitis pigmentosa, ataxia telangiectasia, Bloom's syndrome, retinoblastoma, mucopolysaccharide storage diseases (e.g., Hurler syndrome (MPS Type I), Scheie syndrome (MPS Type I S), Hurler-Scheie syndrome (MPS Type I H-S), Hunter syndrome (MPS Type II), Sanfilippo Types A, B, C, and D (MPS Types III A, B, C, and D), Morquio Types A and B (MPS IVA and MPS IVB), Maroteaux-Lamy syndrome (MPS Type VI), Sly syndrome (MPS Type VII), hyaluronidase deficiency (MPS Type IX)), Niemann-Pick Disease Types A/B, C1 and C2, Fabry disease, Schindler disease, GM2-gangliosidosis Type II (Sandhoff Disease), Tay-Sachs disease, Metachromatic Leukodystrophy, Krabbe disease, Mucolipidosis Type I, II/III and IV, Sialidosis Types I and II, Glycogen Storage disease Types I and II (Pompe disease), Gaucher disease Types I, II and III, Fabry disease, cystinosis, Batten disease, Aspartylglucosaminuria, Salla disease, Danon disease (LAMP-2 deficiency), Lysosomal Acid Lipase (LAL) deficiency, neuronal ceroid lipofuscinoses (CLN1-8, INCL, and LINCL), sphingolipidoses, galactosialidosis, amyotrophic lateral sclerosis (ALS), Parkinson's disease, Alzheimer's disease, Huntington's disease, spinocerebellar ataxia, spinal muscular atrophy, Friedreich's ataxia, Duchenne muscular dystrophy (DMD), Becker muscular dystrophies (BMD), dystrophic epidermolysis bullosa (DEB), ectonucleotide pyrophosphatase 1 deficiency, generalized arterial calcification of infancy (GACI), Leber Congenital Amaurosis, Stargardt macular dystrophy (ABCA4), ornithine transcarbamylase (OTC) deficiency, Usher syndrome, alpha-1 antitrypsin deficiency, progressive familial intrahepatic cholestasis (PFIC) type I (ATP8B1 deficiency), type II (ABCB11), type III (ABCB4), or type IV (TJP2) and Cathepsin A deficiency.

[0033] In another aspect, disclosed herein is amethod of increasing expression capacity of a liver-specific enhancer element comprising the nucleic acid sequence CTAAG, comprising introducing a single nucleotide substitution (T to A) mutation such that the substitution results in the nucleic acid sequence comprising CAAAG.

[0034] In another aspect, disclosed herein is a liver-specific enhancer element comprising a nucleic acid sequence selected from: CAAAG; CAAAGT; CAAAGTC; GCAAAGT; GCAAAG; or GCAAAGTC.

[0035] These and other aspects of the disclosure are described in further detail below.

### DESCRIPTION OF DRAWINGS

[0036] FIG. 1A and FIG. 1B depict sequences and alignment of conserved enhancer regions of human and 20 other vertebrates. 115 non-human vertebrate genomes were assessed for conserved SERPINA1 enhancer regions using the UCSC multiz100way and multiz30way multiple alignments. Highlighted nucleotides in the aligned sequences represent differences from the human reference sequence.

[0037] FIG. 2 depicts identification of near-consensus binding sites for various transcription factors (TF) in human SERPINA1 enhancer (hSerpEnh) region, including HNF4 and FOXA, which are key regulators of hepatic gene expression. The arrows in the bottom three rows represent TF binding motifs described by Chuah et al. (2014). The arrows at the top 15 rows represent transcription factor (TF) binding motifs identified by independent analyses described herein. Positions where the human SERPINA1 sequence differs from the most highly preferred nucleotide in the sequence logos are boxed.

[0038] FIG. 3 depicts multiple bioinformatic analyses employed to inform potential removal of CpG (i.e., CpG ablation). The human SERPINA1 enhancer contains one internal CpG and the potential to form CpGs at its 5′ and 3′ ends (highlighted in red and boxed in the “hSerpEnh” track). Low sequence conservation, the presence of human SNPs that are not known to be associated with disease, and the absence of predicted TF binding sites were assessed to inform sequence changes to ablate the central CpG and the remove potential for CpG formation at the ends of the sequence.

[0039] FIG. 4A depicts results of the top 11 constructs (plasmid) in a screen of 30 single (1×) variants using luciferase reporter assay (n=3) in vitro. Results are grouped by rationally designed enhancer variants (1× TFBS Consensus Variants) or conserved SERPINA1 enhancer regions identified in other species (1× Conserved Genomic Variants). Error bars represent standard deviation.

[0040] FIG. 4B depicts the sequence design of the top variant in this screen, hSerpEnh_FOXA_HNF4_consensus_v1. hSerpEnh_FOXA_HNF4_consensus_v1 was designed by modifying the FOXA and HNF4 motifs identified in the human SERPINA1 enhancer to match their respective consensus sequences (GTGAATA to GTAAACA for FOXA and CTAAGT to CAAACT for HNF4). The internal CpG was ablated by changing the G, which both has lower sequence conservation than the C and is at the position of a human SNP, to an A to match the SNP.

[0041] FIG. 5 depicts results of a screen of 10 multimerzied variants in plasmid using an in vitro (HepG2 cells) luciferase reporter assay (n=3). Results are grouped by 3× repeats of rationally designed enhancer variants (3× TFBS Variants), 3× repeats of conserved SERPINA1 enhancer regions identified in other species (3× Conserved Variant), 3× repeats of the human SERPINA1 enhancer separated by spacers of varying lengths and sequences (3× hSerpEnh Spacer Variants), and enhancers with varying numbers of repeats (#Repeat Variants). The wild-type human SERPINA1 enhancer are labelled (wt). The comparison between the 3× human SERPINA1 enhancer variant and the 3× top performing variant is boxed. Two sets of technical triplicates were performed for the 1× and 3× human enhancers and the top performing 3× variant (r1, r2). Error bars represent standard deviation.

[0042] FIG. 6A is a schematic for optimization of spacer sequence to improve performance of hSerpEnh variant repeats. The length and sequence of spacers between SERPINA1 enhancer variant repeats were modified to screen for sequences that improved enhancer function. Spacers of length 2, 3, 5, 11, and 30 were designed to prevent introduction of CpGs or ATGs that may create cryptic translation start sites. 11 nt and 30 nt spacers that contain consensus FOXA and HNF4 binding sites were also designed and tested.

[0043] FIG. 6B depicts three main configurations of enhancer elements for screening of improved enhancer variants. The enhancer variants were tested in two main configurations: (1) as a single copy of the enhancer variant upstream of the transthyretin (TTR) promoter, TTR 5′ UTR, and the minute virus of mice (MVM) intron or (2) as three copies of the enhancer variant upstream of the TTR enhancer, TTR promoter, TTR 5′ UTR, and the MVM intron.

[0044] FIGS. 7A-7D depict expression levels of FVIII constructs having multimeric repeats of Serpin enhancer variants compared to multimeric human Serpin enhancer (3×, 5× and 10×) variants. FIG. 7A depicts expression levels of 3× HNF_FOXA_v1 variants having CpG minimization, GC rich regions (I-motif secondary structures) minimization, or Aspacer (no spacer) performed equivalent to the level seen in 3× hSerpEnh. However, HNF4 FOXA v1 variants repeated 10 times (10×) did not exhibit a meaningful level of FVIII (see, e.g., FIG. 7C), suggesting that the Serpin enhancer exhibits better performance when it is repeated in a certain number, e.g., 3× to 5×, with 3× preference, but not when it is repeated in an excessive number (e.g., 10×). A consistent observation was made with other Serpin Enhancer elements including, for example, that of bushbaby Serpin enhancer, Chinese tree shrew Serpin enhancer, and human Serpin enhancer (hSerpEnh). In particular, 5× and 10× bushbaby Serpin enhancer element did not exhibit detectable expression levels of FVIII when a plasmid containing the element operably linked to FVIII was injected hydrodynamically into a mouse (FIG. 7D).

[0045] FIGS. 8A-FIG. 8E depict FVIII expression as measured by FVIII activity obtained from the serum of mice hydrodynamically injected with a plasmid containing various spacer variants (two-nucleotide long spacers (2-mer; FIG. 8A), three-nucleotide long spacers (3-mer; FIG. 8B), five-nucleotide long spacers (5-mer; FIG. 8C), eleven-nucleotide long spacers (11-mer; FIG. 8D), and thirty nucleotide long spacers (30-mer; FIG. 8E).

[0046] FIG. 9 depicts a chart showing the result of FVIII expression using various spacer variants of hSerpEnh (2mers and 11 mers as spacers) and other Serpin enhancer variants (3× bushbaby Serpin enahancer to 3× Chinese tree shrew Serpin Enhancer). One dose of 50 ng plasmid was hydrodynamically injected to Rag2 mice on day 0 with a single terminal collection at day 3 (˜72 hr post dose).

[0047] FIG. 10 depicts a chart showing the result of FVIII expression using various spacer variants of hSerpEnh (2mers and 11 mers) and other Serpin enhancer variants (3× bushbaby Serpin enahancer to 3× Chinese tree shrew Serpin Enhancer). One dose of ceDNA was hydrodynamically injected to Rag2 mice on day 0 with a single terminal collection at day 3 (˜72 hr post dose).

[0048] FIG. 11 depicts an exemplary annotated nucleotide sequence of a plasmid containing a FVIII ceDNA construct comprising 3× Bushbaby_Aspacers Serpin enhancer element linked to TTRe, TTR liver-specific promoter, MVM intron, codon optimized B-domain deleted FVIII (hFVIII-F309S-BD226seq124-BDD-F309), WPRE 3′UTR, and bGH (SEQ ID NO: 146).

[0049] FIG. 12 depicts an annotated nucleotide sequence of a plasmid containing a FVIII ceDNA construct comprising 3× human Serpin enhancer element linked to TTRe_PromoterSet, Consensus_Kozak, codon optimized hFVIII (hFVIII-F309S-BD226seq124-BDD-F309), PacI_site, WPRE_3pUTR, and bGH (SEQ ID NO: 147).

[0050] FIG. 13 depicts FVIII expression levels in mice dosed hydrodynamically via tail venin injection with ceDNA constructs having various FVIII and Serpin Enhancer combinations, at Day 0 at a low dose of 0.5 mg/kg or a high dose of 2.0 mg/kg (n=5). Factor VIII expression was measured at Days 7, 14, 21, and 28. Expression of FVIII derived from 3× human SerpEnh having 2 bp spacer and 11 bp spacer were compared with 3× human SerpEnh without a spacer

[0051] FIG. 14 depicts FVIII expression levels in mice dosed hydrodynamically via tail vein injection with ceDNA constructs having various FVIII and Serpin Enhancer combinations at Day 0 at a dose of 50 ng (n=5). Factor VIII expression was measured at Days 1 and 3.

[0052] FIG. 15 depicts FVIII expression levels in mice dosed hydrodynamically via tail vein injection at Day 0 at a dose of 10 ng (n=5). Factor VIII expression was measured at Day 3.

[0053] FIG. 16A and FIG. 16B depict FVIII expression levels in mice treated via hydrodynamic tail vein injection with ceDNA constructs having various FVIII and Serpin Enhancer combination (3× Tibetan antelope SERPINA1; 3× Armadillo CpG minimized SERPINA1; 3× Chinese Tree Shrew and 3× Chinese Tree Shrew CpG minimized; and 3× Bushbaby Aspacer) at Day 0 at three different dose levels: 25 ng/an, 50 ng/an, 100 ng/an (n=4). Factor VIII expression was measured at Day 3.

[0054] FIG. 17 depicts an annotated map of pHTS002L, a plasmid employed in making a library of enhancer-luciferase constructs.

[0055] FIGS. 18A-18D depict comparisons for two biological replicates of barcode counts for each RNA sample normalized to the corresponding barcode counts for an input DNA sample which were mapped back to their associated enhancer sequences (custom MATLAB script).

[0056] FIG. 19 depicts alignment of multiple SERPINA1 enhancer sequences.

### DETAILED DESCRIPTION

[0057] Provided herein are liver-specific promoters, wherein the native cis-regulatory region has been optimized to minimize CpG content and to enhance spacer optimization. The liver-specific promoters of the present disclosure represent an improvement over those previously known by providing enhanced efficiency and safety for liver-specific gene therapy.

### Definitions

[0058] Unless otherwise defined herein, scientific and technical terms used in connection with the present application shall have the meanings that are commonly understood by those of ordinary skill in the art to which this disclosure belongs. It should be understood that this disclosure is not limited to the particular methodology, protocols, and reagents, etc., described herein and as such can vary. The terminology used herein is for the purpose of describing particular embodiments only and is not intended to limit the scope of the present disclosure, which is defined solely by the claims. Definitions of common terms in immunology and molecular biology can be found in The Merck Manual of Diagnosis and Therapy, 19th Edition, published by Merck Sharp & Dohme Corp., 2011 (ISBN 978-0-911910-19-3); Robert S. Porter et al. (eds.), Fields Virology, 6^{th} Edition, published by Lippincott Williams & Wilkins, Philadelphia, PA, USA (2013), Knipe, D. M. and Howley, P. M. (ed.), The Encyclopedia of Molecular Cell Biology and Molecular Medicine, published by Blackwell Science Ltd., 1999-2012 (ISBN 9783527600908); and Robert A. Meyers (ed.), Molecular Biology and Biotechnology: a Comprehensive Desk Reference, published by VCH Publishers, Inc., 1995 (ISBN 1-56081-569-8); Immunology by Werner Luttmann, published by Elsevier, 2006; Janeway's Immunobiology, Kenneth Murphy, Allan Mowat, Casey Weaver (eds.), Taylor & Francis Limited, 2014 (ISBN 0815345305, 9780815345305); Lewin's Genes XI, published by Jones & Bartlett Publishers, 2014 (ISBN-1449659055); Michael Richard Green and Joseph Sambrook, Molecular Cloning: A Laboratory Manual, 4^{th} ed., Cold Spring Harbor Laboratory Press, Cold Spring Harbor, N.Y., USA (2012) (ISBN 1936113414); Davis et al., Basic Methods in Molecular Biology, Elsevier Science Publishing, Inc., New York, USA (2012) (ISBN 044460149X); Laboratory Methods in Enzymology: DNA, Jon Lorsch (ed.) Elsevier, 2013 (ISBN 0124199542); Current Protocols in Molecular Biology (CPMB), Frederick M. Ausubel (ed.), John Wiley and Sons, 2014 (ISBN047150338X, 9780471503385), Current Protocols in Protein Science (CPPS), John E. Coligan (ed.), John Wiley and Sons, Inc., 2005; and Current Protocols in Immunology (CPI) (John E. Coligan, ADA M Kruisbeek, David H Margulies, Ethan M Shevach, Warren Strobe, (eds.) John Wiley and Sons, Inc., 2003 (ISBN 0471142735, 9780471142737), the contents of which are all incorporated by reference herein in their entireties.

[0059] As used herein, the terms, “administration,” “administering” and variants thereof refers to introducing a composition or agent (e.g., a therapeutic nucleic acid or an immunosuppressant as described herein) into a subject and includes concurrent and sequential introduction of one or more compositions or agents. “Administration” can refer, e.g., to therapeutic, pharmacokinetic, diagnostic, research, placebo, and experimental methods. “Administration” also encompasses in vitro and ex vivo treatments. The introduction of a composition or agent into a subject is by any suitable route, including orally, pulmonarily, intranasally, parenterally (intravenously, intramuscularly, intraperitoneally, or subcutaneously), rectally, intralymphatically, intratumorally, or topically. The introduction of a composition or agent into a subject is by electroporation. Administration includes self-administration and the administration by another. Administration can be carried out by any suitable route. A suitable route of administration allows the composition or the agent to perform its intended function. For example, if a suitable route is intravenous, the composition is administered by introducing the composition or agent into a vein of the subject.

[0060] As used herein, the phrases “nucleic acid therapeutic”, “therapeutic nucleic acid” and “TNA” are used interchangeably and refer to any modality of therapeutic using nucleic acids as an active component of therapeutic agent to treat a disease or disorder. As used herein, these phrases refer to RNA-based therapeutics and DNA-based therapeutics. Non-limiting examples of RNA-based therapeutics include mRNA, antisense RNA and oligonucleotides, ribozymes, aptamers, interfering RNAs (RNAi), Dicer-substrate dsRNA, small hairpin RNA (shRNA), guide RNA (gRNA), asymmetrical interfering RNA (aiRNA), microRNA (miRNA). Non-limiting examples of DNA-based therapeutics include minicircle DNA, minigene, viral DNA (e.g., Lentiviral or AAV genome) or non-viral synthetic DNA vectors, closed-ended linear duplex DNA (ceDNA/CELiD), plasmids, bacmids, doggybone (dbDNA™) DNA vectors, minimalistic immunological-defined gene expression (MIDGE)-vector, nonviral ministring DNA vector (linear-covalently closed DNA vector), or dumbbell-shaped DNA minimal vector (“dumbbell DNA”).

[0061] As used herein, an “effective amount” or “therapeutically effective amount” of a therapeutic agent, such as a FVIII therapeutic protein or fragment thereof, is an amount sufficient to produce the desired effect, e.g., treatment or prevention of hemophilia A. Suitable assays for measuring expression of a target gene or target sequence include, e.g., examination of protein or RNA levels using techniques known to those of skill in the art such as dot blots, northern blots, in situ hybridization, ELISA, immunoprecipitation, enzyme function, as well as phenotypic assays known to those of skill in the art. However, dosage levels are based on a variety of factors, including the type of injury, the age, weight, sex, medical condition of the patient, the severity of the condition, the route of administration, and the particular active agent employed. Thus, the dosage regimen may vary widely, but can be determined routinely by a physician using standard methods. Additionally, the terms “therapeutic amount”, “therapeutically effective amounts” and “pharmaceutically effective amounts” include prophylactic or preventative amounts of the compositions of the described disclosure. In prophylactic or preventative applications of the described disclosure, pharmaceutical compositions or medicaments are administered to a patient susceptible to, or otherwise at risk of, a disease, disorder or condition in an amount sufficient to eliminate or reduce the risk, lessen the severity, or delay the onset of the disease, disorder or condition, including biochemical, histologic and/or behavioral symptoms of the disease, disorder or condition, its complications, and intermediate pathological phenotypes presenting during development of the disease, disorder or condition. It is generally preferred that a maximum dose be used, that is, the highest safe dose according to some medical judgment. In one embodiment, the disease, disorder or condition is hemophilia A. The terms “dose” and “dosage” are used interchangeably herein.

[0062] As used herein the term “therapeutic effect” refers to a consequence of treatment, the results of which are judged to be desirable and beneficial. A therapeutic effect can include, directly or indirectly, the arrest, reduction, or elimination of a disease manifestation. A therapeutic effect can also include, directly or indirectly, the arrest reduction or elimination of the progression of a disease manifestation.

[0063] For any therapeutic agent described herein therapeutically effective amount may be initially determined from preliminary in vitro studies and/or animal models. A therapeutically effective dose may also be determined from human data. The applied dose may be adjusted based on the relative bioavailability and potency of the administered compound. Adjusting the dose to achieve maximal efficacy based on the methods described above and other well-known methods is within the capabilities of the ordinarily skilled artisan. General principles for determining therapeutic effectiveness, which may be found in Chapter 1 of Goodman and Gilman's The Pharmacological Basis of Therapeutics, 10^{th} Edition, McGraw-Hill (New York) (2001), incorporated herein by reference, are summarized below.

[0064] Pharmacokinetic principles provide a basis for modifying a dosage regimen to obtain a desired degree of therapeutic efficacy with a minimum of unacceptable adverse effects. In situations where the drug's plasma concentration can be measured and related to therapeutic window, additional guidance for dosage modification can be obtained.

[0065] As used herein, the terms “heterologous nucleic acid sequence” and “transgene” are used interchangeably and refer to a nucleic acid of interest (other than a nucleic acid encoding a capsid polypeptide) that is incorporated into and may be delivered and expressed by a ceDNA vector as disclosed herein. In one embodiment, a nucleic acid sequence may be a heterologous nucleic acid sequence. In one embodiment, the term “heterologous nucleic acid” is meant to refer to a nucleic acid (or transgene) that is not present in, expressed by, or derived from the cell or subject to which it is contacted.

[0066] As used herein, the terms “expression cassette” and “transcription cassette” are used interchangeably and refer to a linear stretch of nucleic acids that includes a transgene that is operably linked to one or more promoters or other regulatory sequences sufficient to direct transcription of the transgene, but which does not comprise capsid-encoding sequences, other vector sequences or inverted terminal repeat regions. An expression cassette may additionally comprise one or more cis-acting sequences (e.g., promoters, enhancers, or repressors), one or more introns, and one or more post-transcriptional regulatory elements.

[0067] The terms “polynucleotide” and “nucleic acid,” used interchangeably herein, refer to a polymeric form of nucleotides of any length, either ribonucleotides or deoxyribonucleotides. Thus, this term includes single, double, or multi-stranded DNA or RNA, genomic DNA, cDNA, DNA-RNA hybrids, or a polymer including purine and pyrimidine bases or other natural, chemically or biochemically modified, non-natural, or derivatized nucleotide bases. “Oligonucleotide” generally refers to polynucleotides of between about 5 and about 100 nucleotides of single- or double-stranded DNA. However, for the purposes of this disclosure, there is no upper limit to the length of an oligonucleotide. Oligonucleotides are also known as “oligomers” or “oligos” and may be isolated from genes, or chemically synthesized by methods known in the art. The terms “polynucleotide” and “nucleic acid” should be understood to include, as applicable to the embodiments being described, single-stranded (such as sense or antisense) and double-stranded polynucleotides. DNA may be in the form of, e.g., antisense molecules, plasmid DNA, DNA-DNA duplexes, pre-condensed DNA, PCR products, vectors (P1, PAC, BAC, YAC, artificial chromosomes), expression cassettes, chimeric sequences, chromosomal DNA, or derivatives and combinations of these groups. DNA may be in the form of minicircle, plasmid, bacmid, minigene, ministring DNA (linear covalently closed DNA vector), closed-ended linear duplex DNA (CELiD or ceDNA), doggybone (dbDNA™) DNA, dumbbell shaped DNA, minimalistic immunological-defined gene expression (MIDGE)-vector, viral vector or nonviral vectors. RNA may be in the form of small interfering RNA (siRNA), Dicer-substrate dsRNA, small hairpin RNA (shRNA), guide RNA (gRNA), asymmetrical interfering RNA (aiRNA), microRNA (miRNA), mRNA, rRNA, tRNA, viral RNA (vRNA), and combinations thereof. Nucleic acids include nucleic acids containing known nucleotide analogs or modified backbone residues or linkages, which are synthetic, naturally occurring, and non-naturally occurring, and which have similar binding properties as the reference nucleic acid. Examples of such analogs and/or modified residues include, without limitation, phosphorothioates, phosphorodiamidate morpholino oligomer (morpholino), phosphoramidates, methyl phosphonates, chiral-methyl phosphonates, 2′-O-methyl ribonucleotides, locked nucleic acid (LNA™), and peptide nucleic acids (PNAs). Unless specifically limited, the term encompasses nucleic acids containing known analogues of natural nucleotides that have similar binding properties as the reference nucleic acid. Unless otherwise indicated, a particular nucleic acid sequence also implicitly encompasses conservatively modified variants thereof (e.g., degenerate codon substitutions), alleles, orthologs, SNPs, and complementary sequences as well as the sequence explicitly indicated.

[0068] “Nucleotides” contain a sugar deoxyribose (DNA) or ribose (RNA), a base, and a phosphate group. Nucleotides are linked together through the phosphate groups.

[0069] “Bases” include purines and pyrimidines, which further include natural compounds adenine, thymine, guanine, cytosine, uracil, inosine, and natural analogs, and synthetic derivatives of purines and pyrimidines, which include, but are not limited to, modifications which place new reactive groups such as, but not limited to, amines, alcohols, thiols, carboxylates, and alkylhalides.

[0070] The term “nucleic acid construct” as used herein refers to a nucleic acid molecule, either single- or double-stranded, which is isolated from a naturally occurring gene or which is modified to contain segments of nucleic acids in a manner that would not otherwise exist in nature or which is synthetic. The term nucleic acid construct is synonymous with the term “expression cassette” when the nucleic acid construct contains the control sequences required for expression of a coding sequence of the present disclosure. An “expression cassette” includes a DNA coding sequence operably linked to a promoter.

[0071] By “hybridizable” or “complementary” or “substantially complementary” it is meant that a nucleic acid (e.g., RNA) includes a sequence of nucleotides that enables it to non-covalently bind, i.e. form Watson-Crick base pairs and/or G/U base pairs, “anneal”, or “hybridize,” to another nucleic acid in a sequence-specific, antiparallel, manner (i.e., a nucleic acid specifically binds to a complementary nucleic acid) under the appropriate in vitro and/or in vivo conditions of temperature and solution ionic strength. As is known in the art, standard Watson-Crick base-pairing includes: adenine (A) pairing with thymidine (T), adenine (A) pairing with uracil (U), and guanine (G) pairing with cytosine (C). In addition, it is also known in the art that for hybridization between two RNA molecules (e.g., dsRNA), guanine (G) base pairs with uracil (U). For example, G/U base-pairing is partially responsible for the degeneracy (i.e., redundancy) of the genetic code in the context of tRNA anti-codon base-pairing with codons in mRNA. In the context of this disclosure, a guanine (G) of a protein-binding segment (dsRNA duplex) of a subject DNA-targeting RNA molecule is considered complementary to an uracil (U), and vice versa. As such, when a G/U base-pair can be made at a given nucleotide position a protein-binding segment (dsRNA duplex) of a subject DNA-targeting RNA molecule, the position is not considered to be non-complementary, but is instead considered to be complementary.

[0072] The terms “peptide,” “polypeptide,” and “protein” are used interchangeably herein, and refer to a polymeric form of amino acids of any length, which can include coded and non-coded amino acids, chemically or biochemically modified or derivatized amino acids, and polypeptides having modified peptide backbones.

[0073] A DNA sequence that “encodes” a particular FVIII protein is a DNA nucleic acid sequence that is transcribed into the particular RNA and/or protein. A DNA polynucleotide may encode an RNA (mRNA) that is translated into protein, or a DNA polynucleotide may encode an RNA that is not translated into protein (e.g., tRNA, rRNA, or a DNA-targeting RNA; also called “non-coding” RNA or ncRNA”).

[0074] As used herein, the term “fusion protein” as used herein refers to a polypeptide which comprises protein domains from at least two different proteins. For example, a fusion protein may comprise (i) a therapeutic protein, or a fragment thereof (e.g., FVIII or a fragment thereof) and (ii) at least one non-GOI protein. Fusion proteins encompassed herein include, but are not limited to, an antibody, or Fc or antigen-binding fragment of an antibody fused to a therapeutic protein (e.g., a FVIII protein), e.g., an extracellular domain of a receptor, ligand, enzyme or peptide. The protein or fragment thereof that is part of a fusion protein can be a monospecific antibody or a bispecific or multispecific antibody.

[0075] As used herein, the term “genomic safe harbor gene” or “safe harbor gene” refers to a gene or loci that a nucleic acid sequence can be inserted such that the sequence can integrate and function in a predictable manner (e.g., express a protein of interest) without significant negative consequences to endogenous gene activity, or the promotion of cancer. In some embodiments, a safe harbor gene is also a loci or gene where an inserted nucleic acid sequence can be expressed efficiently and at higher levels than a non-safe harbor site.

[0076] As used herein, the term “gene delivery” means a process by which foreign DNA is transferred to host cells for applications of gene therapy.

[0077] As used herein, the term “terminal repeat” or “TR” includes any viral terminal repeat or synthetic sequence that comprises at least one minimal required origin of replication and a region comprising a palindrome hairpin structure. A Rep-binding sequence (“RBS”) (also referred to as RBE (Rep-binding element)) and a terminal resolution site (“TRS”) together constitute a “minimal required origin of replication” and thus the TR comprises at least one RBS and at least one TRS. TRs that are the inverse complement of one another within a given stretch of polynucleotide sequence are typically each referred to as an “inverted terminal repeat” or “ITR”. In the context of a virus, ITRs mediate replication, virus packaging, integration and provirus rescue. As was unexpectedly found in the disclosure herein, TRs that are not inverse complements across their full length can still perform the traditional functions of ITRs, and thus the term ITR is used herein to refer to a TR in a ceDNA genome or ceDNA vector that is capable of mediating replication of ceDNA vector. It will be understood by one of ordinary skill in the art that in complex ceDNA vector configurations more than two ITRs or asymmetric ITR pairs may be present. The ITR can be an AAV ITR or a non-AAV ITR, or can be derived from an AAV ITR or a non-AAV ITR. For example, the ITR can be derived from the family Parvoviridae, which encompasses parvoviruses and dependoviruses (e.g., canine parvovirus, bovine parvovirus, mouse parvovirus, porcine parvovirus, human parvovirus B-19), or the SV40 hairpin that serves as the origin of SV40 replication can be used as an ITR, which can further be modified by truncation, substitution, deletion, insertion and/or addition. Parvoviridae family viruses consist of two subfamilies: Parvovirinae, which infect vertebrates, and Densovirinae, which infect invertebrates. Dependoparvoviruses include the viral family of the adeno-associated viruses (AAV) which are capable of replication in vertebrate hosts including, but not limited to, human, primate, bovine, canine, equine and ovine species. For convenience herein, an ITR located 5′ to (upstream of) an expression cassette in a ceDNA vector is referred to as a “5′ ITR” or a “left ITR”, and an ITR located 3′ to (downstream of) an expression cassette in a ceDNA vector is referred to as a “3′ ITR” or a “right ITR”.

[0078] A “wild-type ITR” or “WT-ITR” refers to the sequence of a naturally occurring ITR sequence in an AAV or other dependovirus that retains, e.g., Rep binding activity and Rep nicking ability. The nucleic acid sequence of a WT-ITR from any AAV serotype may slightly vary from the canonical naturally occurring sequence due to degeneracy of the genetic code or drift, and therefore WT-ITR sequences encompassed for use herein include WT-ITR sequences as result of naturally occurring changes taking place during the production process (e.g., a replication error).

[0079] As used herein, the term “substantially symmetrical WT-ITRs” or a “substantially symmetrical WT-ITR pair” refers to a pair of WT-ITRs within a single ceDNA genome or ceDNA vector that are both wild type ITRs that have an inverse complement sequence across their entire length. For example, an ITR can be considered to be a wild-type sequence, even if it has one or more nucleotides that deviate from the canonical naturally occurring sequence, so long as the changes do not affect the properties and overall three-dimensional structure of the sequence. In some aspects, the deviating nucleotides represent conservative sequence changes. As one non-limiting example, a sequence that has at least 95%, 96%, 97%, 98%, or 99% sequence identity to the canonical sequence (as measured, e.g., using BLAST at default settings), and also has a symmetrical three-dimensional spatial organization to the other WT-ITR such that their 3D structures are the same shape in geometrical space. The substantially symmetrical WT-ITR has the same A, C-C‘ and B-B’ loops in 3D space. A substantially symmetrical WT-ITR can be functionally confirmed as WT by determining that it has an operable Rep binding site (RBE or RBE′) and terminal resolution site (TRS) that pairs with the appropriate Rep protein. One can optionally test other functions, including transgene expression under permissive conditions.

[0080] As used herein, the phrases of “modified ITR” or “mod-ITR” or “mutant ITR” are used interchangeably herein and refer to an ITR that has a mutation in at least one or more nucleotides as compared to the WT-ITR from the same serotype. The mutation can result in a change in one or more of A, C, C′, B, B′ regions in the ITR, and can result in a change in the three-dimensional spatial organization (i.e. its 3D structure in geometric space) as compared to the 3D spatial organization of a WT-ITR of the same serotype.

[0081] As used herein, the term “asymmetric ITRs” also referred to as “asymmetric ITR pairs” refers to a pair of ITRs within a single ceDNA genome or ceDNA vector that are not inverse complements across their full length. As one non-limiting example, an asymmetric ITR pair does not have a symmetrical three-dimensional spatial organization to their cognate ITR such that their 3D structures are different shapes in geometrical space. Stated differently, an asymmetrical ITR pair have the different overall geometric structure, i.e., they have different organization of their A, C-C′ and B-B′ loops in 3D space (e.g., one ITR may have a short C-C′ arm and/or short B-B′ arm as compared to the cognate ITR). The difference in sequence between the two ITRs may be due to one or more nucleotide addition, deletion, truncation, or point mutation. In one embodiment, one ITR of the asymmetric ITR pair may be a wild-type AAV ITR sequence and the other ITR a modified ITR as defined herein (e.g., a non-wild-type or synthetic ITR sequence). In another embodiment, neither ITRs of the asymmetric ITR pair is a wild-type AAV sequence and the two ITRs are modified ITRs that have different shapes in geometrical space (i.e., a different overall geometric structure). In some embodiments, one mod-ITRs of an asymmetric ITR pair can have a short C-C′ arm and the other ITR can have a different modification (e.g., a single arm, or a short B-B′ arm etc.) such that they have different three-dimensional spatial organization as compared to the cognate asymmetric mod-ITR.

[0082] As used herein, the term “symmetric ITRs” refers to a pair of ITRs within a single ceDNA genome or ceDNA vector that are wild-type or mutated (e.g., modified relative to wild-type) dependoviral ITR sequences and are inverse complements across their full length. In one non-limiting example, both ITRs are wild type ITRs sequences from AAV2. In another example, neither ITRs are wild type ITR AAV2 sequences (i.e., they are a modified ITR, also referred to as a mutant ITR), and can have a difference in sequence from the wild type ITR due to nucleotide addition, deletion, substitution, truncation, or point mutation. For convenience herein, an ITR located 5′ to (upstream of) an expression cassette in a ceDNA vector is referred to as a “5′ ITR” or a “left ITR”, and an ITR located 3′ to (downstream of) an expression cassette in a ceDNA vector is referred to as a “3′ ITR” or a “right ITR”.

[0083] As used herein, the terms “substantially symmetrical modified-ITRs” or a “substantially symmetrical mod-ITR pair” refers to a pair of modified-ITRs within a single ceDNA genome or ceDNA vector that are both that have an inverse complement sequence across their entire length. For example, the modified ITR can be considered substantially symmetrical, even if it has some nucleic acid sequences that deviate from the inverse complement sequence so long as the changes do not affect the properties and overall shape. As one non-limiting example, a sequence that has at least 85%, 90%, 95%, 96%, 97%, 98%, or 99% sequence identity to the canonical sequence (as measured using BLAST at default settings), and also has a symmetrical three-dimensional spatial organization to their cognate modified ITR such that their 3D structures are the same shape in geometrical space. Stated differently, a substantially symmetrical modified-ITR pair have the same A, C-C′ and B-B′ loops organized in 3D space. In some embodiments, the ITRs from a mod-ITR pair may have different reverse complement nucleic acid sequences but still have the same symmetrical three-dimensional spatial organization—that is both ITRs have mutations that result in the same overall 3D shape. For example, one ITR (e.g., 5′ ITR) in a mod-ITR pair can be from one serotype, and the other ITR (e.g., 3′ ITR) can be from a different serotype, however, both can have the same corresponding mutation (e.g., if the 5′ITR has a deletion in the C region, the cognate modified 3′ITR from a different serotype has a deletion at the corresponding position in the C′ region), such that the modified ITR pair has the same symmetrical three-dimensional spatial organization. In such embodiments, each ITR in a modified ITR pair can be from different serotypes (e.g., AAV1, 2, 3, 4, 5, 6, 7, 8, 9, 10, 11, and 12) such as the combination of AAV2 and AAV6, with the modification in one ITR reflected in the corresponding position in the cognate ITR from a different serotype. In one embodiment, a substantially symmetrical modified ITR pair refers to a pair of modified ITRs (mod-ITRs) so long as the difference in nucleic acid sequences between the ITRs does not affect the properties or overall shape and they have substantially the same shape in 3D space. As a non-limiting example, a mod-ITR that has at least 95%, 96%, 97%, 98% or 99% sequence identity to the canonical mod-ITR as determined by standard means well known in the art such as BLAST (Basic Local Alignment Search Tool), or BLASTN at default settings, and also has a symmetrical three-dimensional spatial organization such that their 3D structure is the same shape in geometric space. A substantially symmetrical mod-ITR pair has the same A, C-C′ and B-B′ loops in 3D space, e.g., if a modified ITR in a substantially symmetrical mod-ITR pair has a deletion of a C-C′ arm, then the cognate mod-ITR has the corresponding deletion of the C-C′ loop and also has a similar 3D structure of the remaining A and B-B′ loops in the same shape in geometric space of its cognate mod-ITR.

[0084] The term “flanking” refers to a relative position of one nucleic acid sequence with respect to another nucleic acid sequence. Generally, in the sequence ABC, B is flanked by A and C. The same is true for the arrangement AxBxC. Thus, a flanking sequence precedes or follows a flanked sequence but need not be contiguous with, or immediately adjacent to the flanked sequence. In one embodiment, the term flanking refers to terminal repeats at each end of the linear duplex ceDNA vector.

[0085] As used herein, the terms “treat,” “treating,” and/or “treatment” include abrogating, substantially inhibiting, slowing or reversing the progression of a condition, substantially ameliorating clinical symptoms of a condition, or substantially preventing the appearance of clinical symptoms of a condition, obtaining beneficial or desired clinical results. In one embodiment, the condition is hemophilia A. Treating further refers to accomplishing one or more of the following: (a) reducing the severity of the disorder; (b) limiting development of symptoms characteristic of the disorder(s) being treated; (c) limiting worsening of symptoms characteristic of the disorder(s) being treated; (d) limiting recurrence of the disorder(s) in patients that have previously had the disorder(s); and (e) limiting recurrence of symptoms in patients that were previously asymptomatic for the disorder(s). Beneficial or desired clinical results, such as pharmacologic and/or physiologic effects include, but are not limited to, preventing the disease, disorder or condition from occurring in a subject that may be predisposed to the disease, disorder or condition but does not yet experience or exhibit symptoms of the disease (prophylactic treatment), alleviation of symptoms of the disease, disorder or condition, diminishment of extent of the disease, disorder or condition, stabilization (i.e., not worsening) of the disease, disorder or condition, preventing spread of the disease, disorder or condition, delaying or slowing of the disease, disorder or condition progression, amelioration or palliation of the disease, disorder or condition, and combinations thereof, as well as prolonging survival as compared to expected survival if not receiving treatment.

[0086] As used herein, the term “increase,” “enhance,” “raise” (and like terms) generally refers to the act of increasing, either directly or indirectly, a concentration, level, function, activity, or behavior relative to the natural, expected, or average, or relative to a control condition.

[0087] As used herein, the term “minimize”, “reduce”, “decrease,” and/or “inhibit” (and like terms) generally refers to the act of reducing, either directly or indirectly, a concentration, level, function, activity, or behavior relative to the natural, expected, or average, or relative to a control condition.

[0088] As used herein, the term “ceDNA genome” refers to an expression cassette that further incorporates at least one inverted terminal repeat region. A ceDNA genome may further comprise one or more spacer regions. In some embodiments the ceDNA genome is incorporated as an intermolecular duplex polynucleotide of DNA into a plasmid or viral genome.

[0089] As used herein, the term “ceDNA spacer region” refers to an intervening sequence that separates functional elements in the ceDNA vector or ceDNA genome. In some embodiments, ceDNA spacer regions keep two functional elements at a desired distance for optimal functionality. In some embodiments, ceDNA spacer regions provide or add to the genetic stability of the ceDNA genome within e.g., a plasmid or baculovirus. In some embodiments, ceDNA spacer regions facilitate ready genetic manipulation of the ceDNA genome by providing a convenient location for cloning sites and the like. For example, in certain aspects, an oligonucleotide “polylinker” containing several restriction endonuclease sites, or a non-open reading frame sequence designed to have no known protein (e.g., transcription factor) binding sites can be positioned in the ceDNA genome to separate the cis—acting factors, e.g., inserting a 6mer, 12mer, 18mer, 24mer, 48mer, 86mer, 176mer, etc. between the terminal resolution site and the upstream transcriptional regulatory element. Similarly, the spacer may be incorporated between the polyadenylation signal sequence and the 3′-terminal resolution site.

[0090] As used herein, the terms “Rep binding site, “Rep binding element, “RBE” and “RBS” are used interchangeably and refer to a binding site for Rep protein (e.g., AAV Rep 78 or AAV Rep 68) which upon binding by a Rep protein permits the Rep protein to perform its site-specific endonuclease activity on the sequence incorporating the RBS. An RBS sequence and its inverse complement together form a single RBS. RBS sequences are known in the art, and include, for example, 5′-GCGCGCTCGCTCGCTC-3′ (SEQ ID NO: 140), an RBS sequence identified in AAV2. Any known RBS sequence may be used in the embodiments of the disclosure, including other known AAV RBS sequences and other naturally known or synthetic RBS sequences. Without being bound by theory it is thought that he nuclease domain of a Rep protein binds to the duplex nucleic acid sequence GCTC, and thus the two known AAV Rep proteins bind directly to and stably assemble on the duplex oligonucleotide, 5′-(GCGC)(GCTC)(GCTC)(GCTC)-3′ (SEQ ID NO: 140). In addition, soluble aggregated conformers (i.e., undefined number of inter-associated Rep proteins) dissociate and bind to oligonucleotides that contain Rep binding sites. Each Rep protein interacts with both the nitrogenous bases and phosphodiester backbone on each strand. The interactions with the nitrogenous bases provide sequence specificity whereas the interactions with the phosphodiester backbone are non- or less-sequence specific and stabilize the protein-DNA complex.

[0091] As used herein, the terms “terminal resolution site” and “TRS” are used interchangeably herein and refer to a region at which Rep forms a tyrosine-phosphodiester bond with the 5′ thymidine generating a 3′ OH that serves as a substrate for DNA extension via a cellular DNA polymerase, e.g., DNA pol delta or DNA pol epsilon. Alternatively, the Rep-thymidine complex may participate in a coordinated ligation reaction. In some embodiments, a TRS minimally encompasses a non-base-paired thymidine. In some embodiments, the nicking efficiency of the TRS can be controlled at least in part by its distance within the same molecule from the RBS. When the acceptor substrate is the complementary ITR, then the resulting product is an intramolecular duplex. TRS sequences are known in the art, and include, for example, 5′-GGTTGA-3′, the hexanucleotide sequence identified in AAV2. Any known TRS sequence may be used in the embodiments of the disclosure, including other known AAV TRS sequences and other naturally known or synthetic TRS sequences such as AGTT (SEQ ID NO: 1690), GGTTGG, AGTTGG, AGTTGA, and other motifs such as RRTTRR.

[0092] As used herein, the term “ceDNA-plasmid” refers to a plasmid that comprises a ceDNA genome as an intermolecular duplex.

[0093] As used herein, the term “ceDNA-bacmid” refers to an infectious baculovirus genome comprising a ceDNA genome as an intermolecular duplex that is capable of propagating in E. coli as a plasmid, and so can operate as a shuttle vector for baculovirus.

[0094] As used herein, the term “ceDNA-baculovirus” refers to a baculovirus that comprises a ceDNA genome as an intermolecular duplex within the baculovirus genome.

[0095] As used herein, the terms “ceDNA-baculovirus infected insect cell” and “ceDNA-BIIC” are used interchangeably, and refer to an invertebrate host cell (including, but not limited to an insect cell (e.g., an Sf9 cell)) infected with a ceDNA-baculovirus.

[0096] As used herein, the term “ceDNA” refers to capsid-free closed-ended linear double stranded (ds) duplex DNA for non-viral gene transfer, synthetic or otherwise. Detailed description of ceDNA is described in International application of PCT/US2017/020828, filed Mar. 3, 2017, the entire contents of which are expressly incorporated herein by reference. Certain methods for the production of ceDNA comprising various inverted terminal repeat (ITR) sequences and configurations using cell-based methods are described in Example 1 of International applications PCT/US18/49996, filed Sep. 7, 2018, and PCT/US2018/064242, filed Dec. 6, 2018 each of which is incorporated herein in its entirety by reference. Certain methods for the production of synthetic ceDNA vectors comprising various ITR sequences and configurations are described, e.g., in International application PCT/US2019/14122, filed Jan. 18, 2019, the entire content of which is incorporated herein by reference.

[0097] As used herein, the term “closed-ended DNA vector” refers to a capsid-free DNA vector with at least one covalently closed end and where at least part of the vector has an intramolecular duplex structure.

[0098] As used herein, the terms “ceDNA vector” and “ceDNA” are used interchangeably and refer to a closed-ended DNA vector comprising at least one terminal palindrome. In some embodiments, the ceDNA comprises two covalently-closed ends.

[0099] As used herein, the term “neDNA” or “nicked ceDNA” refers to a closed-ended DNA having a nick or a gap of 1-100 base pairs in a stem region or spacer region 5′ upstream of an open reading frame (e.g., a promoter and transgene to be expressed).

[0100] As used herein, the terms “gap” refers to a discontinued portion of synthetic DNA vector of the present disclosure, creating a stretch of single stranded DNA portion in otherwise double stranded ceDNA. The gap can be 1 base-pair to 100 base-pair long in length in one strand of a duplex DNA. Typical gaps, designed and created by the methods described herein and synthetic vectors generated by the methods can be, for example, 1, 2, 3, 4, 5, 6, 7, 8, 9, 10, 11, 12, 13, 14, 15, 16, 17, 18, 19, 20, 21, 22, 23, 24, 25, 26, 27, 28, 29, 30, 31, 32, 33, 34, 35, 36, 37, 38, 39, 40, 41, 42, 43, 44, 45, 46, 47, 48, 49, 50, 51, 52, 53, 54, 55, 56, 57, 58, 59 or 60 bp long in length. Exemplified gaps in the present disclosure can be 1 bp to 10 bp long, 1 to 20 bp long, 1 to 30 bp long in length.

[0101] As defined herein, “reporters” refer to proteins that can be used to provide detectable read-outs. Reporters generally produce a measurable signal such as fluorescence, color, or luminescence. Reporter protein coding sequences encode proteins whose presence in the cell or organism is readily observed. For example, fluorescent proteins cause a cell to fluoresce when excited with light of a particular wavelength, luciferases cause a cell to catalyze a reaction that produces light, and enzymes such as β-galactosidase convert a substrate to a colored product. Exemplary reporter polypeptides useful for experimental or diagnostic purposes include, but are not limited to β-lactamase, β-galactosidase (LacZ), alkaline phosphatase (AP), thymidine kinase (TK), green fluorescent protein (GFP) and other fluorescent proteins, chloramphenicol acetyltransferase (CAT), luciferase, and others well known in the art.

[0102] As used herein, the terms “sense” and “antisense” refer to the orientation of the structural element on the polynucleotide. The sense and antisense versions of an element are the reverse complement of each other.

[0103] As used herein, the term “synthetic AAV vector” and “synthetic production of AAV vector” refers to an AAV vector and synthetic production methods thereof in an entirely cell-free environment.

[0104] As used herein, “reporters” refer to proteins that can be used to provide detectable read-outs. Reporters generally produce a measurable signal such as fluorescence, color, or luminescence. Reporter protein coding sequences encode proteins whose presence in the cell or organism is readily observed. For example, fluorescent proteins cause a cell to fluoresce when excited with light of a particular wavelength, luciferases cause a cell to catalyze a reaction that produces light, and enzymes such as β-galactosidase convert a substrate to a colored product. Exemplary reporter polypeptides useful for experimental or diagnostic purposes include, but are not limited to β-lactamase, β-galactosidase (LacZ), alkaline phosphatase (AP), thymidine kinase (TK), green fluorescent protein (GFP) and other fluorescent proteins, chloramphenicol acetyltransferase (CAT), luciferase, and others well known in the art.

[0105] As used herein, the term “effector protein” refers to a polypeptide that provides a detectable read-out, either as, for example, a reporter polypeptide, or more appropriately, as a polypeptide that kills a cell, e.g., a toxin, or an agent that renders a cell susceptible to killing with a chosen agent or lack thereof. Effector proteins include any protein or peptide that directly targets or damages the host cell's DNA and/or RNA. For example, effector proteins can include, but are not limited to, a restriction endonuclease that targets a host cell DNA sequence (whether genomic or on an extrachromosomal element), a protease that degrades a polypeptide target necessary for cell survival, a DNA gyrase inhibitor, and a ribonuclease-type toxin. In some embodiments, the expression of an effector protein controlled by a synthetic biological circuit as described herein can participate as a factor in another synthetic biological circuit to thereby expand the range and complexity of a biological circuit system's responsiveness.

[0106] Transcriptional regulators refer to transcriptional activators and repressors that either activate or repress transcription of a gene of interest, such as FVIII. Promoters are regions of nucleic acid that initiate transcription of a particular gene. Transcriptional activators typically bind nearby to transcriptional promoters and recruit RNA polymerase to directly initiate transcription. Repressors bind to transcriptional promoters and sterically hinder transcriptional initiation by RNA polymerase. Other transcriptional regulators may serve as either an activator or a repressor depending on where they bind and cellular and environmental conditions. Non-limiting examples of transcriptional regulator classes include, but are not limited to homeodomain proteins, zinc-finger proteins, winged-helix (forkhead) proteins, and leucine-zipper proteins.

[0107] As used herein, a “repressor protein” or “inducer protein” is a protein that binds to a regulatory sequence element and represses or activates, respectively, the transcription of sequences operatively linked to the regulatory sequence element. Preferred repressor and inducer proteins as described herein are sensitive to the presence or absence of at least one input agent or environmental input. Preferred proteins as described herein are modular in form, comprising, for example, separable DNA-binding and input agent-binding or responsive elements or domains.

[0108] As used herein, “carrier” includes any and all solvents, dispersion media, vehicles, coatings, diluents, antibacterial and antifungal agents, isotonic and absorption delaying agents, buffers, carrier solutions, suspensions, colloids, and the like. The use of such media and agents for pharmaceutically active substances is well known in the art. Supplementary active ingredients can also be incorporated into the compositions. The phrase “pharmaceutically-acceptable” refers to molecular entities and compositions that do not produce a toxic, an allergic, or similar untoward reaction when administered to a host.

[0109] As used herein, an “input agent responsive domain” is a domain of a transcription factor that binds to or otherwise responds to a condition or input agent in a manner that renders a linked DNA binding fusion domain responsive to the presence of that condition or input. In one embodiment, the presence of the condition or input results in a conformational change in the input agent responsive domain, or in a protein to which it is fused, that modifies the transcription-modulating activity of the transcription factor.

[0110] The term “in vivo” refers to assays or processes that occur in or within an organism, such as a multicellular animal. In some of the aspects described herein, a method or use can be said to occur “in vivo” when a unicellular organism, such as a bacterium, is used. The term “ex vivo” refers to methods and uses that are performed using a living cell with an intact membrane that is outside of the body of a multicellular animal or plant, e.g., explants, cultured cells, including primary cells and cell lines, transformed cell lines, and extracted tissue or cells, including blood cells, among others. The term “in vitro” refers to assays and methods that do not require the presence of a cell with an intact membrane, such as cellular extracts, and can refer to the introducing of a programmable synthetic biological circuit in a non-cellular system, such as a medium not comprising cells or cellular systems, such as cellular extracts.

[0111] The term “promoter,” as used herein, refers to any nucleic acid sequence that regulates the expression of another nucleic acid sequence by driving transcription of the nucleic acid sequence, which can be a target gene, e.g., heterologous target gene, encoding a protein or an RNA. Promoters can be constitutive, inducible, repressible, tissue-specific, or any combination thereof. A promoter is a control region of a nucleic acid sequence at which initiation and rate of transcription of the remainder of a nucleic acid sequence are controlled. A promoter can also contain genetic elements at which regulatory proteins and molecules can bind, such as RNA polymerase and other transcription factors. In some embodiments of the aspects described herein, a promoter can drive the expression of a transcription factor that regulates the expression of the promoter itself. Within the promoter sequence will be found a transcription initiation site, as well as protein binding domains responsible for the binding of RNA polymerase. Eukaryotic promoters will often, but not always, contain “TATA” boxes and “CAT” boxes. Various promoters, including inducible promoters, may be used to drive the expression of transgenes in the ceDNA vectors disclosed herein. A promoter sequence may be bounded at its 3′ terminus by the transcription initiation site and extends upstream (5′ direction) to include the minimum number of bases or elements necessary to initiate transcription at levels detectable above background.

[0112] In one embodiment, the promoter contained in the nucleic acid expression cassettes and vectors disclosed herein is a liver-specific promoter.

[0113] The term “liver-specific promoter” encompasses any promoter that confers liver-specific expression to a (trans)gene. Non-limiting examples of liver-specific promoters are provided on the Liver-specific Gene Promoter Database (LSPD, rulai.cshl.edu/LSPD/), and include, for example, the transthyretin (TTR) promoter or TTR-minimal promoter (TTRm), the alpha 1-antitrypsin (AAT) promoter, the albumin (ALB) promotor or minimal promoter, the apolipoprotein A1 (APOA1) promoter or minimal promoter, the complement factor B (CFB) promoter, the ketohexokinase (KHK) promoter, the hemopexin (HPX) promoter or minimal promoter, the nicotinamide N-methyltransferase (NNMT) promoter or minimal promoter, the (liver) carboxylesterase 1 (CES1) promoter or minimal promoter, the protein C (PROC) promoter or minimal promoter, the apolipoprotein C3 (APOC3) promoter or minimal promoter, the mannan-binding lectin serine protease 2 (MASP2) promoter or minimal promoter, the hepcidin antimicrobial peptide (HAMP) promoter or minimal promoter, and the serpin peptidase inhibitor, clade C (antithrombin), member 1 (SERPINC1) promoter or minimal promoter.

[0114] In some embodiments, the promoter is a mammalian liver-specific promoter, in particular a murine or human liver-specific promoter.

[0115] The term “enhancer” as used herein refers to a cis-acting regulatory sequence (e.g., 50-1,500 base pairs) that binds one or more proteins (e.g., activator proteins, or transcription factor) to increase transcriptional activation of a nucleic acid sequence. Enhancers can be positioned up to 1,000,000 base pars upstream of the gene start site or downstream of the gene start site that they regulate. An enhancer can be positioned within an intronic region, or in the exonic region of an unrelated gene.

[0116] A promoter can be said to drive expression or drive transcription of the nucleic acid sequence that it regulates. The phrases “operably linked,” “operatively positioned,” “operatively linked,” “under control,” and “under transcriptional control” indicate that a promoter is in a correct functional location and/or orientation in relation to a nucleic acid sequence it regulates to control transcriptional initiation and/or expression of that sequence. An “inverted promoter,” as used herein, refers to a promoter in which the nucleic acid sequence is in the reverse orientation, such that what was the coding strand is now the non-coding strand, and vice versa. Inverted promoter sequences can be used in various embodiments to regulate the state of a switch. In addition, in various embodiments, a promoter can be used in conjunction with an enhancer.

[0117] A promoter can be one naturally associated with a gene or sequence, as can be obtained by isolating the 5′ non-coding sequences located upstream of the coding segment and/or exon of a given gene or sequence. Such a promoter can be referred to as “endogenous.” Similarly, in some embodiments, an enhancer can be one naturally associated with a nucleic acid sequence, located either downstream or upstream of that sequence.

[0118] In some embodiments, a coding nucleic acid segment is positioned under the control of a “recombinant promoter” or “heterologous promoter,” both of which refer to a promoter that is not normally associated with the encoded nucleic acid sequence it is operably linked to in its natural environment. A recombinant or heterologous enhancer refers to an enhancer not normally associated with a given nucleic acid sequence in its natural environment. Such promoters or enhancers can include promoters or enhancers of other genes; promoters or enhancers isolated from any other prokaryotic, viral, or eukaryotic cell; and synthetic promoters or enhancers that are not “naturally occurring,” i.e., comprise different elements of different transcriptional regulatory regions, and/or mutations that alter expression through methods of genetic engineering that are known in the art. In addition to producing nucleic acid sequences of promoters and enhancers synthetically, promoter sequences can be produced using recombinant cloning and/or nucleic acid amplification technology, including PCR, in connection with the synthetic biological circuits and modules disclosed herein (see, e.g., U.S. Pat. Nos. 4,683,202, 5,928,906, each incorporated herein by reference). Furthermore, it is contemplated that control sequences that direct transcription and/or expression of sequences within non-nuclear organelles such as mitochondria, chloroplasts, and the like, can be employed as well.

[0119] As described herein, an “inducible promoter” is one that is characterized by initiating or enhancing transcriptional activity when in the presence of, influenced by, or contacted by an inducer or inducing agent. An “inducer” or “inducing agent,” as defined herein, can be endogenous, or a normally exogenous compound or protein that is administered in such a way as to be active in inducing transcriptional activity from the inducible promoter. In some embodiments, the inducer or inducing agent, i.e., a chemical, a compound or a protein, can itself be the result of transcription or expression of a nucleic acid sequence (i.e., an inducer can be an inducer protein expressed by another component or module), which itself can be under the control or an inducible promoter. In some embodiments, an inducible promoter is induced in the absence of certain agents, such as a repressor. Examples of inducible promoters include but are not limited to, tetracycline, metallothionine, ecdysone, mammalian viruses (e.g., the adenovirus late promoter; and the mouse mammary tumor virus long terminal repeat (MMTV-LTR)) and other steroid-responsive promoters, rapamycin responsive promoters and the like.

[0120] The terms “DNA regulatory sequences,” “control elements,” and “regulatory elements,” used interchangeably herein, refer to transcriptional and translational control sequences, such as promoters, enhancers, polyadenylation signals, terminators, protein degradation signals, and the like, that provide for and/or regulate transcription of a non-coding sequence (e.g., DNA-targeting RNA) or a coding sequence (e.g., site-directed modifying polypeptide, or Cas9/Csn1 polypeptide) and/or regulate translation of an encoded polypeptide.

[0121] Regulatory elements comprise at least one transcription factor binding site (TFBS), more in particular at least one binding site for a tissue-specific transcription factor, most particularly at least one binding site for a liver-specific transcription factor. Typically, regulatory elements as used herein increase or enhance promoter-driven gene expression when compared to the transcription of the gene from the promoter alone, without the regulatory elements. Thus, regulatory elements particularly comprise enhancer sequences, although it is to be understood that the regulatory elements enhancing transcription are not limited to typical far upstream enhancer sequences, but may occur at any distance of the gene they regulate. Indeed, it is known in the art that sequences regulating transcription may be situated either upstream (e.g., in the promoter region) or downstream (e.g., in the 3′UTR) of the gene they regulate in vivo, and may be located in the immediate vicinity of the gene or further away. Although regulatory elements as disclosed herein typically are naturally occurring sequences, combinations of (parts of) such regulatory elements or several copies of a regulatory element, i.e., non-naturally occurring sequences, are themselves also envisaged as regulatory element. Regulatory elements as used herein may be part of a larger sequence involved in transcriptional control, e.g., part of a promoter sequence. However, regulatory elements alone are typically not sufficient to initiate transcription, but require a promoter to this end.

[0122] In one embodiment, the one or more regulatory elements contained in the nucleic acid expression cassettes and vectors disclosed herein are preferably liver-specific. Non-limiting examples of liver-specific regulatory elements are disclosed in WO 2009/130208, incorporated by reference in its entirety herein. Another example of a liver-specific regulatory element is a regulatory element derived from the transthyretin (TTR) gene, also referred to herein as “TTRe.” “Liver-specific expression”, as used herein, refers to the preferential or predominant expression of a (trans)gene (as RNA and/or polypeptide) in the liver as compared to other tissues. In one embodiment, at least 50% of the (trans)gene expression occurs within the liver. According to some embodiments, at least 60%, at least 70%, at least 75%, at least 80%, at least 85%, at least 90%, at least 95%, at least 97%, at least 99% or 100% of the (trans)gene expression occurs within the liver. In one embodiment, liver-specific expression entails that there is no ‘leakage’ of expressed gene product to other organs, such as spleen, muscle, heart and/or lung. It is to be understood that, where liver-specific is mentioned in the context of expression, hepatocyte-specific expression is also explicitly envisaged. Similarly, where tissue-specific expression is used in the application, cell-type specific expression of the cell type(s) predominantly making up the tissue is also envisaged.

[0123] As used herein, the term “liver cells” encompasses the cells predominantly populating the liver and encompasses mainly hepatocytes, oval cells, liver sinusoidal endothelial cells (LSEC) and cholangiocytes (epithelial cells forming the bile ducts).

[0124] “Operably linked” refers to a juxtaposition wherein the components so described are in a relationship permitting them to function in their intended manner. For instance, a promoter is operably linked to a coding sequence if the promoter affects its transcription or expression. An “expression cassette” includes a DNA sequence, e.g., heterologous DNA sequence, that is operably linked to a promoter or other regulatory sequence sufficient to direct transcription of the transgene in the ceDNA vector. Suitable promoters include, for example, tissue specific promoters or promoters of AAV origin.

[0125] The term “subject” as used herein refers to a human or animal, to whom treatment, including prophylactic treatment, with the ceDNA vector according to the present disclosure, is provided. Usually, the animal is a vertebrate such as, but not limited to a primate, rodent, domestic animal or game animal. Primates include but are not limited to, chimpanzees, cynomologous monkeys, spider monkeys, and macaques, e.g., Rhesus. Rodents include mice, rats, woodchucks, ferrets, rabbits and hamsters. Domestic and game animals include, but are not limited to, cows, horses, pigs, deer, bison, buffalo, feline species, e.g., domestic cat, canine species, e.g., dog, fox, wolf, avian species, e.g., chicken, emu, ostrich, and fish. In certain embodiments of the aspects described herein, the subject is a mammal, e.g., a primate or a human. A subject can be male or female. Additionally, a subject can be an infant or a child. In some embodiments, the subject can be a neonate or an unborn subject, e.g., the subject is in utero. Preferably, the subject is a mammal. The mammal can be a human, non-human primate, mouse, rat, dog, cat, horse, or cow, but is not limited to these examples. Mammals other than humans can be advantageously used as subjects that represent animal models of diseases and disorders. In addition, the methods and compositions described herein can be used for domesticated animals and/or pets. A human subject can be of any age, gender, race or ethnic group, e.g., Caucasian (white), Asian, African, black, African American, African European, Hispanic, Mideastern, etc. In some embodiments, the subject can be a patient or other subject in a clinical setting. In some embodiments, the subject is already undergoing treatment. In some embodiments, the subject is an embryo, a fetus, neonate, infant, child, adolescent, or adult. In some embodiments, the subject is a human fetus, human neonate, human infant, human child, human adolescent, or human adult. In some embodiments, the subject is an animal embryo, or non-human embryo or non-human primate embryo. In some embodiments, the subject is a human embryo.

[0126] The term “control” as used herein is meant to refer to a reference standard. In one embodiment, a control may be a negative control sample obtained from a healthy patient. According to other embodiments, the control is a positive control sample obtained from a patient diagnosed with a genetic disease or disorder (e.g., hemophilia). In one embodiment, the control is a historical control or a standard reference value or a range of values (such as a previously tested control sample, such as a group of hemophilia A patients with a known prognosis or outcome, or a group of samples representing baseline or normal values).

[0127] A difference between a test sample and a control can be an increase or, conversely, a decrease. The difference can be a qualitative difference or a quantitative difference, for example, a statistically significant difference. In some examples, a difference is an increase or decrease, relative to a control, of at least about 5%, such as at least about 10%, at least about 20%, at least about 30%, by less than about 40%, at least about 50%, at least about 60%, at least about 70%, at least about 80%, at least about 90%, at least about 100%, at least about 150%, at least about 200%, at least about 250%, at least about 300%, at least about 350%, at least about 400%, at least about 500% or more than 500%.

[0128] As used herein, the term “host cell”, includes any cell type that is susceptible to transformation, transfection, transduction, and the like with a nucleic acid construct or ceDNA expression vector of the present disclosure. As non-limiting examples, a host cell can be an isolated primary cell, pluripotent stem cells, CD34⁺ cells), induced pluripotent stem cells, or any of a number of immortalized cell lines (e.g., HepG2 cells). Alternatively, a host cell can be an in situ or in vivo cell in a tissue, organ or organism.

[0129] The term “exogenous” refers to a substance present in a cell other than its native source. The term “exogenous” when used herein can refer to a nucleic acid (e.g., a nucleic acid encoding a polypeptide) or a polypeptide that has been introduced by a process involving the hand of man into a biological system such as a cell or organism in which it is not normally found, and one wishes to introduce the nucleic acid or polypeptide into such a cell or organism. Alternatively, “exogenous” can refer to a nucleic acid or a polypeptide that has been introduced by a process involving the hand of man into a biological system such as a cell or organism in which it is found in relatively low amounts and one wishes to increase the amount of the nucleic acid or polypeptide in the cell or organism, e.g., to create ectopic expression or levels. In contrast, the term “endogenous” refers to a substance that is native to the biological system or cell.

[0130] The term “sequence identity” refers to the relatedness between two nucleic acid sequences. For purposes of the present disclosure, the degree of sequence identity between two deoxyribonucleotide sequences is determined using the Needleman-Wunsch algorithm (Needleman and Wunsch, 1970, supra) as implemented in the Needle program of the EMBOSS package (EMBOSS: The European Molecular Biology Open Software Suite, Rice et al., 2000, supra), preferably version 3.0.0 or later. The optional parameters used are gap open penalty of 10, gap extension penalty of 0.5, and the EDNAFULL (EMBOSS version of NCBI NUC4.4) substitution matrix. The output of Needle labeled “longest identity” (obtained using the nobrief option) is used as the percent identity and is calculated as follows: (Identical Deoxyribonucleotides.times.100)/(Length of Alignment-Total Number of Gaps in Alignment). The length of the alignment is preferably at least 10 nucleotides, preferably at least 25 nucleotides more preferred at least 50 nucleotides and most preferred at least 100 nucleotides.

[0131] The term “homology” or “homologous” as used herein is defined as the percentage of nucleotide residues that are identical to the nucleotide residues in the corresponding sequence on the target chromosome, after aligning the sequences and introducing gaps, if necessary, to achieve the maximum percent sequence identity. Alignment for purposes of determining percent nucleotide sequence homology can be achieved in various ways that are within the skill in the art, for instance, using publicly available computer software such as BLAST, BLAST-2, ALIGN, ClustalW2 or Megalign (DNASTAR) software. Those skilled in the art can determine appropriate parameters for aligning sequences, including any algorithms needed to achieve maximal alignment over the full length of the sequences being compared. In some embodiments, a nucleic acid sequence (e.g., DNA sequence), for example of a homology arm, is considered “homologous” when the sequence is at least 70%, at least 75%, at least 80%, at least 85%, at least 90%, at least 91%, at least 92%, at least 93%, at least 94%, at least 95%, at least 96%, at least 97%, at least 98%, at least 99%, or more, identical to the corresponding native or unedited nucleic acid sequence (e.g., genomic sequence) of the host cell.

[0132] The term “heterologous,” as used herein, means a nucleotide or polypeptide sequence that is not found in the native nucleic acid or protein, respectively. A heterologous nucleic acid sequence may be linked to a naturally-occurring nucleic acid sequence (or a variant thereof) (e.g., by genetic engineering) to generate a chimeric nucleotide sequence encoding a chimeric polypeptide. A heterologous nucleic acid sequence may be linked to a variant polypeptide (e.g., by genetic engineering) to generate a nucleotide sequence encoding a fusion variant polypeptide.

[0133] A “vector” or “expression vector” is a replicon, such as plasmid, bacmid, phage, virus, virion, or cosmid, to which another DNA segment, i.e. an “insert”, may be attached so as to bring about the replication of the attached segment in a cell. A vector can be a nucleic acid construct designed for delivery to a host cell or for transfer between different host cells. A vector can include nucleic acid sequences that allow it to replicate in a host cell, such as an origin of replication. A vector can also include one or more selectable marker genes and other genetic elements. The term “vector” encompasses any genetic element that is capable of replication when associated with the proper control elements and that can transfer gene sequences to cells. In some embodiments, a vector can be an expression vector or recombinant vector. In some embodiments, the vector is an expression vector that contains the regulatory sequences necessary to allow transcription and translation of the inserted gene (s). In some embodiments, the vector is a ceDNA vector. In some embodiments, the vector is an AAV vector. In some embodiments, the vector is a retroviral gamma vector, a lentiviral vector, or an adenoviral vector.

[0134] As used herein, the term “expression vector” refers to a vector that directs expression of an RNA or polypeptide from sequences linked to transcriptional regulatory sequences on the vector. The sequences expressed will often, but not necessarily, be heterologous to the cell. An expression vector may comprise additional elements, for example, the expression vector may have two replication systems, thus allowing it to be maintained in two organisms, for example in human cells for expression and in a prokaryotic host for cloning and amplification. The term “expression” refers to the cellular processes involved in producing RNA and proteins and as appropriate, secreting proteins, including where applicable, but not limited to, for example, transcription, transcript processing, translation and protein folding, modification and processing. “Expression products” include RNA transcribed from a gene, and polypeptides obtained by translation of mRNA transcribed from a gene. The term “gene” means the nucleic acid sequence which is transcribed (DNA) to RNA in vitro or in vivo when operably linked to appropriate regulatory sequences. The gene may or may not include regions preceding and following the coding region, e.g., 5′ untranslated (5′UTR) or “leader” sequences and 3′ UTR or “trailer” sequences, as well as intervening sequences (introns) between individual coding segments (exons).

[0135] By “recombinant vector” is meant a vector that includes a nucleic acid sequence, e.g., heterologous nucleic acid sequence, or “transgene” that is capable of expression in vivo. It should be understood that the vectors described herein can, in some embodiments, be combined with other suitable compositions and therapies. In some embodiments, the vector is episomal. The use of a suitable episomal vector provides a means of maintaining the nucleotide of interest in the subject in high copy number extra chromosomal DNA thereby eliminating potential effects of chromosomal integration.

[0136] The phrase “genetic disease” as used herein refers to a disease, partially or completely, directly or indirectly, caused by one or more abnormalities in the genome, especially a condition that is present from birth. The abnormality may be a mutation, an insertion or a deletion. The abnormality may affect the coding sequence of the gene or its regulatory sequence. The genetic disease may be, but not limited to DMD, hemophilia, cystic fibrosis, Huntington's chorea, familial hypercholesterolemia (LDL receptor defect), hepatoblastoma, Wilson's disease, congenital hepatic porphyria, inherited disorders of hepatic metabolism, Lesch Nyhan syndrome, sickle cell anemia, thalassemia, xeroderma pigmentosum, Fanconi's anemia, retinitis pigmentosa, ataxia telangiectasia, Bloom's syndrome, retinoblastoma, and Tay-Sachs disease.

[0137] As used herein the term “comprising” or “comprises” is used in reference to compositions, methods, and respective component(s) thereof, that are essential to the method or composition, yet open to the inclusion of unspecified elements, whether essential or not.

[0138] As used herein the term “consisting essentially of” refers to those elements required for a given embodiment. The term permits the presence of elements that do not materially affect the basic and novel or functional characteristic(s) of that embodiment. The use of “comprising” indicates inclusion rather than limitation.

[0139] The term “consisting of” refers to compositions, methods, and respective components thereof as described herein, which are exclusive of any element not recited in that description of the embodiment.

[0140] As used herein the term “consisting essentially of” refers to those elements required for a given embodiment. The term permits the presence of additional elements that do not materially affect the basic and novel or functional characteristic(s) of that embodiment of the disclosure.

[0141] As used in this specification and the appended claims, the singular forms “a,” “an,” and “the” include plural references unless the context clearly dictates otherwise. Thus, for example, references to “the method” includes one or more methods, and/or steps of the type described herein and/or which will become apparent to those persons skilled in the art upon reading this disclosure and so forth. Similarly, the word “or” is intended to include “and” unless the context clearly indicates otherwise. Although methods and materials similar or equivalent to those described herein can be used in the practice or testing of this disclosure, suitable methods and materials are described below. The abbreviation, “e.g.”, is derived from the Latin exempli gratia and is used herein to indicate a non-limiting example. Thus, the abbreviation “e.g.” is synonymous with the term “for example.”

[0142] Groupings of alternative elements or embodiments of the disclosure disclosed herein are not to be construed as limitations. Each group member can be referred to and claimed individually or in any combination with other members of the group or other elements found herein. One or more members of a group can be included in, or deleted from, a group for reasons of convenience and/or patentability. When any such inclusion or deletion occurs, the specification is herein deemed to contain the group as modified thus fulfilling the written description of all Markush groups used in the appended claims.

[0143] In some embodiments of any of the aspects, the disclosure described herein does not concern a process for cloning human beings, processes for modifying the germ line genetic identity of human beings, uses of human embryos for industrial or commercial purposes or processes for modifying the genetic identity of animals which are likely to cause them suffering without any substantial medical benefit to man or animal, and also animals resulting from such processes.

[0144] Other terms are defined herein within the description of the various aspects of the disclosure.

[0145] All patents and other publications; including literature references, issued patents, published patent applications, and co-pending patent applications; cited throughout this application are expressly incorporated herein by reference for the purpose of describing and disclosing, for example, the methodologies described in such publications that might be used in connection with the technology described herein. These publications are provided solely for their disclosure prior to the filing date of the present application. Nothing in this regard should be construed as an admission that the inventors are not entitled to antedate such disclosure by virtue of prior disclosure or for any other reason. All statements as to the date or representation as to the contents of these documents is based on the information available to the applicants and does not constitute any admission as to the correctness of the dates or contents of these documents.

[0146] The description of embodiments of the disclosure is not intended to be exhaustive or to limit the disclosure to the precise form disclosed. While specific embodiments of, and examples for, the disclosure are described herein for illustrative purposes, various equivalent modifications are possible within the scope of the disclosure, as those skilled in the relevant art will recognize. For example, while method steps or functions are presented in a given order, alternative embodiments may perform functions in a different order, or functions may be performed substantially concurrently. The teachings of the disclosure provided herein can be applied to other procedures or methods as appropriate. The various embodiments described herein can be combined to provide further embodiments. Aspects of the disclosure can be modified, if necessary, to employ the compositions, functions and concepts of the above references and application to provide yet further embodiments of the disclosure. Moreover, due to biological functional equivalency considerations, some changes can be made in protein structure without affecting the biological or chemical action in kind or amount. These and other changes can be made to the disclosure in light of the detailed description. All such modifications are intended to be included within the scope of the appended claims.

[0147] Specific elements of any of the foregoing embodiments can be combined or substituted for elements in other embodiments. Furthermore, while advantages associated with certain embodiments of the disclosure have been described in the context of these embodiments, other embodiments may also exhibit such advantages, and not all embodiments need necessarily exhibit such advantages to fall within the scope of the disclosure.

### II. Expression Cassettes Optimized for Liver-Specific Expression

[0148] The present disclosure provides liver-specific expression cassettes to enhance transcription in liver tissue and/or cells. As discussed in the Examples, the present disclosure provides a novel set of non-natural modifications to a native liver-specific enhancer region that unexpectedly increase acute protein expression level and improve sequence characteristics known to impact protein expression durability.

[0149] In one embodiment, the liver-specific expression cassette provided herein comprises an enhancer nucleic acid sequence. In one embodiment, the liver-specific expression cassette provided herein comprises more than one repeated enhancer nucleic acid sequences. In one embodiment, the liver-specific expression cassette provided herein comprises two repeated enhancer nucleic acid sequences. In one embodiment, the liver-specific expression cassette provided herein comprises three repeated enhancer nucleic acid sequences. In one embodiment, the liver-specific expression cassette provided herein comprises five repeated enhancer nucleic acid sequences. In one embodiment, the liver-specific expression cassette provided herein comprises between two and 10 repeated enhancer nucleic acid sequences. In one embodiment, the liver-specific expression cassette provided herein comprises ten repeated enhancer nucleic acid sequences. In one embodiment, the liver-specific expression cassette provided herein comprises between 3 and 10 repeated enhancer nucleic acid sequences. In one embodiment, the liver-specific expression cassette comprises more than three repeated enhancer nucleic acid sequences.

[0150] In one embodiment, the liver-specific expression cassette comprises two or more repeated enhancer nucleic acid sequences, wherein at least two nucleic acids (2 mer) separate each repeated enhancer nucleic acid sequence. In one embodiment, the liver-specific expression cassette comprises three or more repeated enhancer nucleic acid sequences, wherein at least two nucleic acids separate each repeated enhancer nucleic acid sequence. In one embodiment, the liver-specific expression cassette comprises five or more repeated enhancer nucleic acid sequences, wherein at least two nucleic acids separate each repeated enhancer nucleic acid sequence. In one embodiment, the liver-specific expression cassette comprises ten or more repeated enhancer nucleic acid sequences, wherein at least two nucleic acids separate each repeated enhancer nucleic acid sequence. In one embodiment, the liver-specific expression cassette comprises about 3 to 10 repeated enhancer nucleic acid sequences, wherein at least two nucleic acids separate each repeated enhancer nucleic acid sequence.

[0151] In one embodiment, the liver-specific expression cassette provided herein comprises two or more repeated enhancer nucleic acid sequences, wherein at least three nucleic acids (3 mer) separate each repeated enhancer nucleic acid sequence. In one embodiment, the liver-specific expression cassette comprises three or more repeated enhancer nucleic acid sequences, wherein at least three nucleic acids separate each repeated enhancer nucleic acid sequence. In one embodiment, the liver-specific expression cassette comprises five or more repeated enhancer nucleic acid sequences, wherein at least three nucleic acids separate each repeated enhancer nucleic acid sequence. In one embodiment, the liver-specific expression cassette comprises ten or more repeated enhancer nucleic acid sequences, wherein at least three nucleic acids separate each repeated enhancer nucleic acid sequence. In one embodiment, the liver-specific expression cassette comprises between 3 and 10 repeated enhancer nucleic acid sequences, wherein at least three nucleic acids separate each repeated enhancer nucleic acid sequence.

[0152] In one embodiment, the liver-specific expression cassette provided herein comprises two or more repeated enhancer nucleic acid sequences, wherein at least five nucleic acids (5 mer) separate each repeated enhancer nucleic acid sequence. In one embodiment, the liver-specific expression cassette comprises three or more repeated enhancer nucleic acid sequences, wherein at least five nucleic acids separate each repeated enhancer nucleic acid sequence. In one embodiment, the liver-specific expression cassette comprises five or more repeated enhancer nucleic acid sequences, wherein at least five nucleic acids separate each repeated enhancer nucleic acid sequence. In one embodiment, the liver-specific expression cassette comprises ten or more repeated enhancer nucleic acid sequences, wherein at least five nucleic acids separate each repeated enhancer nucleic acid sequence. In one embodiment, the liver-specific expression cassette comprises about 3 to 10 repeated enhancer nucleic acid sequences, wherein at least five nucleic acids separate each repeated enhancer nucleic acid sequence.

[0153] In one embodiment, the liver-specific expression cassette provided herein comprises two or more repeated enhancer nucleic acid sequences, wherein at least 11 nucleic acids (11 mer) separate each repeated enhancer nucleic acid sequence. In one embodiment, the liver-specific expression cassette comprises three or more repeated enhancer nucleic acid sequences, wherein at least 11 nucleic acids separate each repeated enhancer nucleic acid sequence. In one embodiment, the liver-specific expression cassette comprises five or more repeated enhancer nucleic acid sequences, wherein at least 11 nucleic acids separate each repeated enhancer nucleic acid sequence. In one embodiment, the liver-specific expression cassette comprises ten or more repeated enhancer nucleic acid sequences, wherein at least 11 nucleic acids separate each repeated enhancer nucleic acid sequence. In one embodiment, the liver-specific expression cassette comprises about 3 to 10 repeated enhancer nucleic acid sequences, wherein at least 11 nucleic acids separate each repeated enhancer nucleic acid sequence.

[0154] In one embodiment, the liver-specific expression cassette provided herein comprises two or more repeated enhancer nucleic acid sequences, wherein at least 30 nucleic acids (30 mer) separate each repeated enhancer nucleic acid sequence. In one embodiment, the liver-specific expression cassette comprises three or more repeated enhancer nucleic acid sequences, wherein at least 30 nucleic acids separate each repeated enhancer nucleic acid sequence. In one embodiment, the liver-specific expression cassette comprises five or more repeated enhancer nucleic acid sequences, wherein at least 30 nucleic acids separate each repeated enhancer nucleic acid sequence. In one embodiment, the liver-specific expression cassette comprises ten or more repeated enhancer nucleic acid sequences, wherein at least 30 nucleic acids separate each repeated enhancer nucleic acid sequence. In one embodiment, the liver-specific expression cassette provided herein comprises about 3 to 10 repeated enhancer nucleic acid sequences, wherein at least 30 nucleic acids separate each repeated enhancer nucleic acid sequence.

[0155] In one embodiment, the liver-specific expression cassette provided herein comprises two or more repeated enhancer nucleic acid sequences, wherein between about 2 and 30 nucleic acids separate each repeated enhancer nucleic acid sequence. In one embodiment, the liver-specific expression cassette provided herein comprises three or more repeated enhancer nucleic acid sequences, wherein between about 2 and 30 nucleic acids separate each repeated enhancer nucleic acid sequence. In one embodiment, the liver-specific expression cassette provided herein comprises five or more repeated enhancer nucleic acid sequences, wherein between about 2 and 30 nucleic acids separate each repeated enhancer nucleic acid sequence. In one embodiment, the liver-specific expression cassette provided herein comprises ten or more repeated enhancer nucleic acid sequences, wherein between about 2 and 30 nucleic acids separate each repeated enhancer nucleic acid sequence. In one embodiment, the liver-specific expression cassette comprises about 3 to 10 repeated enhancer nucleic acid sequences, wherein between about 2 and 30 nucleic acids separate each repeated enhancer nucleic acid sequence.

[0156] In one embodiment, the enhancer nucleic acid sequences are further are operably linked to a liver-specific promoter and a transgene. In one embodiment, the liver-specific promoter is a human liver-specific promoter.

[0157] In one embodiment, the liver-specific promoter is selected from the group consisting of a minimal TTR promotor (TTRm), an AAT promoter, an albumin (ALB) promotor or minimal promoter, an apolipoprotein A1 (APOA1) promoter or minimal promoter, a complement factor B (CFB) promoter, a ketohexokinase (KHK) promoter, a hemopexin (HPX) promoter or minimal promoter, a nicotinamide N-methyltransferase (NNMT) promoter or minimal promoter, a carboxylesterase 1 (CES1) promoter or minimal promoter, a protein C (PROC) promoter or minimal promoter, an apolipoprotein C3 (APOC3) promoter or minimal promoter, a mannan-binding lectin serine protease 2 (MASP2) promoter or minimal promoter, a hepcidin antimicrobial peptide (HAMP) promoter or minimal promoter, or a serpin peptidase inhibitor, clade C (antithrombin), member 1 (SERPINC1) promoter or minimal promoter.

[0158] In some embodiments, a promoter may also be a promoter from a human gene. The promoter may also be a tissue specific promoter, such as a liver-specific promoter, such as human alpha 1-antitypsin (HAAT). In one embodiment, the promoter may be synthetic.

[0159] Non-limiting examples of suitable promoters for use in accordance with the present disclosure include any of the promoters described herein, or any of the following:

[0160] In one embodiment, the promoter is hAAT core, the human a1 antitrypsin (hAAT) promoter (Core promoter sequence from human A1AT gene). In one embodiment, the hAAT promoter comprises the sequence set forth as SEQ ID NO: 210 below:

(SEQ ID NO: 210)
GATCTTGCTACCAGTGGAACAGCCACTAAGGATTCTGCAGTGAGA
GCAGAGGGCCAGCTAAGTGGTACTCTCCCAGAGACTGTCTGACTC
ACGCCACCCCCTCCACCTTGGACACAGGACGCTGTGGTTTCTGAG
CCAGGTACAATGACTCCTTTCGGTAAGTGCAGTGGAAGCTGTACA
CTGCCCAGGCAAAGCGTCCGGGCAGCGTAGGCGGGCGACTCAGAT
CCCAGCCAGTGGACTTAGCCCCTGTTTGCTCCTCCGATAACTGGG
GTGACCTTGGTTAATATTCACCAGCAGCCTCCCCCGTTGCCCCTC
TGGATCCACTGCTTAAATACGGACGAGGACAGG

[0161] In one embodiment, the promoter comprises a nucleic acid sequence at least about 85% identical to SEQ ID NO: 210. In one embodiment, the promoter comprises a nucleic acid sequence at least about 90% identical to SEQ ID NO: 210. In one embodiment, the promoter comprises a nucleic acid sequence at least about 95% identical to SEQ ID NO: 210. In one embodiment, the promoter comprises a nucleic acid sequence at least about 96% identical to SEQ ID NO: 210. In one embodiment, the promoter comprises a nucleic acid sequence at least about 97% identical to SEQ ID NO: 210. In one embodiment, the promoter comprises a nucleic acid sequence at least about 98% identical to SEQ ID NO: 210. In one embodiment, the promoter comprises a nucleic acid sequence at least about 99% identical to SEQ ID NO: 210. In one embodiment, the promoter consists of the nucleic acid sequence of SEQ ID NO: 210.

[0162] In one embodiment, the promoter is the minimal transthyretin promoter (TTRm). In one embodiment, the TTRm promoter comprises the sequence set forth as SEQ ID NO: 211 below:

(SEQ ID NO: 211)
GTCTGTCTGCACATTTCGTAGAGCGAGTGTTCCGATACTCTAATC
TCCCTAGGCAAGGTTCATATTTGTGTAGGTTACTTATTCTCCTTT
TGTTGACTAAGTCAATAATCAGAATCAGCAGGTTTGGAGTCAGCT
TGGCAGGGATCAGCAGCCTGGGTTGGAAGGAGGGGGTATAAAAGC
CCCTTCACCAGGAGAAGCCGTC

[0163] In one embodiment, the promoter comprises a nucleic acid sequence at least about 85% identical to SEQ ID NO: 211. In one embodiment, the promoter comprises a nucleic acid sequence at least about 90% identical to SEQ ID NO: 211. In one embodiment, the promoter comprises a nucleic acid sequence at least about 95% identical to SEQ ID NO: 211. In one embodiment, the promoter comprises a nucleic acid sequence at least about 96% identical to SEQ ID NO: 211. In one embodiment, the promoter comprises a nucleic acid sequence at least about 97% identical to SEQ ID NO: 211. In one embodiment, the promoter comprises a nucleic acid sequence at least about 98% identical to SEQ ID NO: 211. In one embodiment, the promoter comprises a nucleic acid sequence at least about 99% identical to SEQ ID NO: 211. In one embodiment, the promoter consists of the nucleic acid sequence of SEQ ID NO: 211.

[0164] In one embodiment, the promoter is hAAT_core_C06, a CpG minimized version of the hAAT core promoter (A1AT gene promoter). In one embodiment, the hAAT promoter comprises the sequence set forth as SEQ ID NO: 212 below:

(SEQ ID NO: 212)
GATCTTGCTACCAGTGGAACAGCCACTAAGGATTCTGCAGTGAGA
GCAGAGGGCCAGCTAAGTGGTACTCTCCCAGAGACTGTCTGACTC
ATGCCACCCCCTCCACCTTGGACACAGGACACTGTGGTTTCTGAG
CCAGGTACAATGACTCCTTTTGGTAAGTGCAGTGGAAGCTGTACA
CTGCCCAGGCAAAGTGTCCGGGCAGCGTAGGCGGGCGACTCAGAT
CCCAGCCAGTGGACTTAGCCCCTGTTTGCTCCTCCGATAACTGGG
GTGACCTTGGTTAATATTCACCAGCAGCCTCCCCCGTTGCCCCTC
TGGATCCACTGCTTAAATACGGACGAGGACAGG.

[0165] In one embodiment, the promoter comprises a nucleic acid sequence at least about 85% identical to SEQ ID NO: 212. In one embodiment, the promoter comprises a nucleic acid sequence at least about 90% identical to SEQ ID NO: 212. In one embodiment, the promoter comprises a nucleic acid sequence at least about 95% identical to SEQ ID NO: 212. In one embodiment, the promoter comprises a nucleic acid sequence at least about 96% identical to SEQ ID NO: 212. In one embodiment, the promoter comprises a nucleic acid sequence at least about 97% identical to SEQ ID NO: 212. In one embodiment, the promoter comprises a nucleic acid sequence at least about 98% identical to SEQ ID NO: 212. In one embodiment, the promoter comprises a nucleic acid sequence at least about 99% identical to SEQ ID NO: 212. In one embodiment, the promoter consists of the nucleic acid sequence of SEQ ID NO: 212.

[0166] In one embodiment, the promoter is hAAT_core_C07, a CpG minimized version of the hAAT core promoter (A1AT gene promoter). In one embodiment, the hAAT promoter comprises the sequence set forth as SEQ ID NO: 213 below:

(SEQ ID NO: 213)
GATCTTGCTACCAGTGGAACAGCCACTAAGGATTCTGCAGTGAGA
GCAGAGGGCCAGCTAAGTGGTACTCTCCCAGAGACTGTCTGACTC
ACGCCACCCCCTCCACCTTGGACACAGGACGCTGTGGTTTCTGAG
CCAGGTACAATGACTCCTTTCGGTAAGTGCAGTGGAAGCTGTACA
CTGCCCAGGCAAAGCGTCCGGGCAGCGTAGGCGGGCGACTCAGAT
CCCAGCCAGTGGACTTAGCCCCTGTTTGCTCCTCTGATAACTGGG
GTGACCTTGGTTAATATTCACCAGCAGCCTCCCCTGTTGCCCCTC
TGGATCCACTGCTTAAATACGGACAAGGACAGG

[0167] In one embodiment, the promoter comprises a nucleic acid sequence at least about 85% identical to SEQ ID NO: 213. In one embodiment, the promoter comprises a nucleic acid sequence at least about 90% identical to SEQ ID NO: 213. In one embodiment, the promoter comprises a nucleic acid sequence at least about 95% identical to SEQ ID NO: 213. In one embodiment, the promoter comprises a nucleic acid sequence at least about 96% identical to SEQ ID NO: 213. In one embodiment, the promoter comprises a nucleic acid sequence at least about 97% identical to SEQ ID NO: 213. In one embodiment, the promoter comprises a nucleic acid sequence at least about 98% identical to SEQ ID NO: 213. In one embodiment, the promoter comprises a nucleic acid sequence at least about 99% identical to SEQ ID NO: 213. In one embodiment, the promoter consists of the nucleic acid sequence of SEQ ID NO: 213.

[0168] In one embodiment, the promoter is hAAT_core_C08, a CpG minimized version of the hAAT core promoter (A1AT gene promoter). In one embodiment, the hAAT promoter comprises the sequence set forth as SEQ ID NO: 214 below:

(SEQ ID NO: 214)
GATCTTGCTACCAGTGGAACAGCCACTAAGGATTCTGCAGTGAGA
GCAGAGGGCCAGCTAAGTGGTACTCTCCCAGAGACTGTCTGACTC
ACGCCACCCCCTCCACCTTGGACACAGGACGCTGTGGTTTCTGAG
CCAGGTACAATGACTCCTTTCGGTAAGTGCAGTGGAAGCTGTACA
CTGCCCAGGCAAAGCGTCTGGGCAGCATAGGCAGGCGACTCAGAT
CCCAGCCAGTGGACTTAGCCCCTGTTTGCTCCTCCGATAACTGGG
GTGACCTTGGTTAATATTCACCAGCAGCCTCCCCCGTTGCCCCTC
TGGATCCACTGCTTAAATACGGACGAGGACAGG

[0169] In one embodiment, the promoter comprises a nucleic acid sequence at least about 85% identical to SEQ ID NO: 214. In one embodiment, the promoter comprises a nucleic acid sequence at least about 90% identical to SEQ ID NO: 214. In one embodiment, the promoter comprises a nucleic acid sequence at least about 95% identical to SEQ ID NO: 214. In one embodiment, the promoter comprises a nucleic acid sequence at least about 96% identical to SEQ ID NO: 214. In one embodiment, the promoter comprises a nucleic acid sequence at least about 97% identical to SEQ ID NO: 214. In one embodiment, the promoter comprises a nucleic acid sequence at least about 98% identical to SEQ ID NO: 214. In one embodiment, the promoter comprises a nucleic acid sequence at least about 99% identical to SEQ ID NO: 214. In one embodiment, the promoter consists of the nucleic acid sequence of SEQ ID NO: 214.

[0170] In one embodiment, the promoter is hAAT_core_C09, a CpG minimized version of the hAAT core promoter (A1AT gene promoter). In one embodiment, the hAAT promoter comprises the sequence set forth as SEQ ID NO: 215 below:

(SEQ ID NO: 215)
GATCTTGCTACCAGTGGAACAGCCACTAAGGATTCTGCAGTGAGA
GCAGAGGGCCAGCTAAGTGGTACTCTCCCAGAGACTGTCTGACTC
ACGCCACCCCCTCCACCTTGGACACAGGACGCTGTGGTTTCTGAG
CCAGGTACAATGACTCCTTTCGGTAAGTGCAGTGGAAGCTGTACA
CTGCCCAGGCAAAGCGTCCGGGCAGCGTAGGCGGGCGACTCAGAT
CCCAGCCAGTGGACTTAGCCCCTGTTTGCTCCTCTGATAACTGGG
GTGACCTTGGTTAATATTCACCAGCAGCCTCCCCCGTTGCCCCTC
TGGATCCACTGCTTAAATACAGACGAGGACAGG

[0171] In one embodiment, the promoter comprises a nucleic acid sequence at least about 85% identical to SEQ ID NO: 215. In one embodiment, the promoter comprises a nucleic acid sequence at least about 90% identical to SEQ ID NO: 215. In one embodiment, the promoter comprises a nucleic acid sequence at least about 95% identical to SEQ ID NO: 215. In one embodiment, the promoter comprises a nucleic acid sequence at least about 96% identical to SEQ ID NO: 215. In one embodiment, the promoter comprises a nucleic acid sequence at least about 97% identical to SEQ ID NO: 215. In one embodiment, the promoter comprises a nucleic acid sequence at least about 98% identical to SEQ ID NO: 215. In one embodiment, the promoter comprises a nucleic acid sequence at least about 99% identical to SEQ ID NO: 215. In one embodiment, the promoter consists of the nucleic acid sequence of SEQ ID NO: 215.

[0172] In one embodiment, the promoter is hAAT_core_C10, a CpG minimized version of the hAAT core promoter (A1AT gene promoter). In one embodiment, the hAAT promoter comprises the sequence set forth as SEQ ID NO: 216 below:

(SEQ ID NO: 216)
GATCTTGCTACCAGTGGAACAGCCACTAAGGATTCTGCAGTGAGA
GCAGAGGGCCAGCTAAGTGGTACTCTCCCAGAGACTGTCTGACTC
ACGCCACCCCCTCCACCTTGGACACAGGACGCTGTGGTTTCTGAG
CCAGGTACAATGACTCCTTTCGGTAAGTGCAGTGGAAGCTGTACA
CTGCCCAGGCAAAGCGTCCGGGCAGCGTAGGCGGGCGACTCAGAT
CCCAGCCAGTGGACTTAGCCCCTGTTTGCTCCTCTGATAACTGGG
GTGACCTTGGTTAATATTCACCAGCAGCCTCCCCCGTTGCCCCTC
TGGATCCACTGCTTAAATACAGACGAGGACAGG

[0173] In one embodiment, the promoter comprises a nucleic acid sequence at least about 85% identical to SEQ ID NO: 216. In one embodiment, the promoter comprises a nucleic acid sequence at least about 90% identical to SEQ ID NO: 216. In one embodiment, the promoter comprises a nucleic acid sequence at least about 95% identical to SEQ ID NO: 216. In one embodiment, the promoter comprises a nucleic acid sequence at least about 96% identical to SEQ ID NO: 216. In one embodiment, the promoter comprises a nucleic acid sequence at least about 97% identical to SEQ ID NO: 216. In one embodiment, the promoter comprises a nucleic acid sequence at least about 98% identical to SEQ ID NO: 216. In one embodiment, the promoter comprises a nucleic acid sequence at least about 99% identical to SEQ ID NO: 216. In one embodiment, the promoter consists of the nucleic acid sequence of SEQ ID NO: 216.

[0174] In one embodiment, the promoter is hAAT_core_truncated, 5p truncated hAAT core promoter derived from hAAT_core (SEQ ID NO: 210). In one embodiment, the hAAT promoter comprises the sequence set forth as SEQ ID NO: 217 below:

(SEQ ID NO: 217)
GATCTTGCTACCAGTGGAACAGCCACTAAGGATTCTGCAGTGAGA
GCAGAGGGCCAGCTAAGTGGTACTCTCCCAGAGACTGTCTGACTC
ACGCCACCCCCTCCACCTTGGACACAGGACGCTGTGGTTTCTGAG
CCAGGTACAATGACTCCTTTCGGTAAGTGCAGTGGAAGCTGTACA
CTGCCCAGGCAAAGCGTCCGGGCAGCGTAGGCGGGCGACTCAGAT
CCCAGCCAGTGGACTTAGCCCCTGTTTGCTCCTCTGATAACTGGG
GTGACCTTGGTTAATATTCACCAGCAGCCTCCCCCGTTGCCCCTC
TGGATCCACTGCTTAAATACAGACGAGGACAGG

[0175] In one embodiment, the promoter comprises a nucleic acid sequence at least about 85% identical to SEQ ID NO: 217. In one embodiment, the promoter comprises a nucleic acid sequence at least about 90% identical to SEQ ID NO: 217. In one embodiment, the promoter comprises a nucleic acid sequence at least about 95% identical to SEQ ID NO: 217. In one embodiment, the promoter comprises a nucleic acid sequence at least about 96% identical to SEQ ID NO: 217. In one embodiment, the promoter comprises a nucleic acid sequence at least about 97% identical to SEQ ID NO: 217. In one embodiment, the promoter comprises a nucleic acid sequence at least about 98% identical to SEQ ID NO: 217. In one embodiment, the promoter comprises a nucleic acid sequence at least about 99% identical to SEQ ID NO: 217. In one embodiment, the promoter consists of the nucleic acid sequence of SEQ ID NO: 217.

[0176] Table 1 below lists core promoter sequences, and their corresponding SEQ ID NOs, that can be implemented in ceDNA FVIII therapeutics described herein.

TABLE 1
Core Promoters

| | | | SEQ ID |
|---|---|---|---|
| | Name | Description | NO. |
| GE-015 | hAAT_core | Core promoter sequence from human A1AT | 210 |
| | | gene | |
| GE-1121 | TTRm | Core promoter sequence from mouse | 211 |
| | | Transthyretin gene | |
| GE-1133 | hAAT_core_C06 | CpG minimized version of the hAAT core | 212 |
| | | promoter (A1AT gene promoter) | |
| GE-1134 | hAAT_core_C07 | CpG minimized version of the hAAT core | 213 |
| | | promoter (A1AT gene promoter) | |
| GE-1135 | hAAT_core_C08 | CpG minimized version of the hAAT core | 214 |
| | | promoter (A1AT gene promoter) | |
| GE-1136 | hAAT_core_C09 | CpG minimized version of the hAAT core | 215 |
| | | promoter (A1AT gene promoter) | |
| GE-1137 | hAAT_core_C10 | CpG minimized version of the hAAT core | 216 |
| | | promoter (A1AT gene promoter) (also | |
| | | referred to as hAAT(979)) | |
| GE-1170 | hAAT_core_truncated | 5p truncated hAAT core promoter derived | 217 |
| | | from GE-015 | |

[0177] According to particular embodiments, the promoter is selected from the group consisting of: human alpha 1-antitrypsin (hAAT) promoter (including the CpG minimized hAAT(979) promoter (CpGmin hAAT_core_C10) and other CpGmin_hAAT promoters like hAAT_core_C06; hAAT_core_C07; hAAT_core_C08; and hAAT_core_C09) and the transthyretin (TTR) liver-specific promoter.

[0178] In one embodiment, the TTRm comprises SEQ ID NO: 211. In one embodiment, the serpin enhancer comprises SEQ ID NO: 19. In one embodiment, the TTRm 5′UTR comprises SEQ ID NO: 141 (ACACAGATCCACAAGCTCCTG).

[0179] In one embodiment, the CpGmin_hAAT promoter comprises a sequence selected from any one of SEQ ID NOs 212, 213, 214, 215 or 216.

[0180] In one embodiment, the enhancer is selected from the group consisting of: a SERPIN enhancer (SerpEnh), human SERPINA1 enhancer, Hepatic Nuclear Factor 4 binding site (HNF4), the transthyretin (TTRe) gene enhancer (TTRe), the Hepatic Nuclear Factor 1 binding site (HNF1), Human apolipoprotein E/C-I liver-specific enhancer (ApoE_Enh), the enhancer region from Pro-albumin gene (ProEnh).

[0181] In one embodiment, the enhancer is a SERPINA1 enhancer. In one embodiment, the enhancer is a SERPINA1 enhancer variant, selected from a nucleic acid sequence as set forth in Table 4, herein. In one embodiment, the SERPINA1 enhancer comprises a sequence having at lest 90%, 91%, 92%, 93%, 94%, 95%, 96%, 97%, 98%, 99% identity to, comprises or consists of any one of the nucleic acid sequences set forth in Table 2, herein.

[0182] According to further embodiments, the enhancer is a human SERPIN1A enhancer. According to still further embodiments, the human SERPIN1A enhancer comprises SEQ ID NO: 81 shown below.

SEQ ID NO: 81
(SEQ ID NO: 81)
GGGGGAGGCTGCTGGTGAATATTAACCAAGGTCACCCCAGTTATC
GGAGGAGCAAACAGGGGCTAAGTCCAC

[0183] In one embodiment, the enhancer is a Chinese Tree Shrew SERPINA1 enhancer. According to further embodiments, the Chinese Tree Shrew SERPINA1 enhancer comprises SEQ ID NO: 82 shown below.

(SEQ ID NO: 82)
GGAGGCTGTTGGTGAATATTAACCAAGGTCACCCCAGTTATCGGA
GGAGCAAACAAGGGCTAAGTCCAC

[0184] In one embodiment, the enhancer is a Chinese Tree Shrew SERPINA1 enhancer. According to further embodiments, the Chinese Tree Shrew SERPINA1 enhancer comprises SEQ ID NO: 122 shown below.

(SEQ ID NO: 122)
GGAGGCTGTTGGTGAATATTAACCAAGGTCACCTCAGTTATCGGA
GGAGCAAACAAGGGCTAAGTCCAC

[0185] In one embodiment, the enhancer is a Bushbaby SERPINA1 enhancer. According to further embodiments, the Bushbaby SERPINA1 enhancer comprises SEQ ID NO: 83 shown below.

(SEQ ID NO: 83)
GGGGGAAGCTACTGGTGAATATTAACCAAGGTCACCCAGTTATCA
GGGAGCAAACAGGAGCTAAGTCCAT

[0186] In one embodiment, the enhancer is a HNF4 enhancer. In one embodiment, the enhancer is HNF4. According to further embodiments, the HNF4 enhancer comprises SEQ ID NO: 84 shown below.

(SEQ ID NO: 84)
GAGGGAGGCTGCTGGTGAATATTAACCAAGGTCACCTCAGTTATC
AGAGGAGCAAACAGGGGCAAAGTCCAT

[0187] In one embodiment, the enhancer is HNF4_FOXA. According to further embodiments, the HNF4_FOXA enhancer comprises SEQ ID NO: 85 shown below.

(SEQ ID NO: 85)
GGGGGAGGCTGCTGGTAAACATTAACCAAGGTCACCCCAGTTATC
AGAGGAGCAAACAGGGGCAAAGTCCAC

[0188] CpG dinucleotides are undesirable for gene therapy applications. CpGs can impact expression durability through stimulation of the innate immune system and through methylation-based silencing. Accordingly, in some embodiments, CpGs are removed from the enhancer nucleic acid sequences. In one embodiment, internal CpGs are removed.

[0189] In one embodiment, the enhancer comprises human SERPINA1 enhancer, wherein CpG dinucleotides have been minimized.

[0190] In one embodiment, the enhancer comprises Chinese Tree Shrew SERPINA1 enhancer, wherein CpG dinucleotides have been minimized.

[0191] In one embodiment, the enhancer comprises Bushbaby SERPINA1 enhancer, wherein CpG dinucleotides have been minimized.

[0192] In one embodiment, the enhancer comprises HNF4, wherein CpG dinucleotides have been minimized.

[0193] In one embodiment, the enhancer comprises HNF4_FOXA, wherein CpG dinucleotides have been minimized.

[0194] In one embodiment, the enhancer comprises human SERPINA1 enhancer, wherein poly-C/poly-G have been minimized.

[0195] In one embodiment, the enhancer comprises Chinese Tree Shrew SERPINA1 enhancer, wherein poly-C/poly-G have been minimized.

[0196] In one embodiment, the enhancer comprises Bushbaby SERPINA1 enhancer, wherein poly-C/poly-G have been minimized.

[0197] In one embodiment, the enhancer comprises HNF4, wherein poly-C/poly-G have been minimized.

[0198] In one embodiment, the enhancer comprises HNF4_FOXA, wherein poly-C/poly-G have been minimized.

[0199] In one embodiment, the enhancer comprises human SERPINA enhancer, wherein CpG dinucleotides and poly-C/poly-G have been minimized.

[0200] In one embodiment, the enhancer comprises Chinese Tree Shrew SERPINA1 enhancer, wherein CpG dinucleotides and poly-C/poly-G have been minimized.

[0201] In one embodiment, the enhancer comprises Bushbaby SERPINA1 enhancer, wherein CpG dinucleotides and poly-C/poly-G have been minimized.

[0202] In one embodiment, the enhancer comprises HNF4, wherein CpG dinucleotides and poly-C/poly-G have been minimized.

[0203] In one embodiment, the enhancer comprises HNF4_FOXA, wherein CpG dinucleotides and poly-C/poly-G have been minimized.

[0204] In some embodiments, the enhancer is selected from a sequence shown in Table 2, below.

TABLE 2
Enhancers

| | | | SEQ |
|---|---|---|---|
| | | | ID |
| Name | Description | Sequence | NO: |
| 3x_HNF4 | 3× repeat of the | GGGGGAGGCTGCTGGTAAACATTAACCAAGGT | 1 |
| FOXA_v1 | Human SERPINA1 | CACCCCAGTTATCAGAGGAGCAAACAGGGGCA | |
| | enhancer with FOXA | AAGTCCACCGGGGGAGGCTGCTGGTAAACATT | |
| | & HNF4 consensus | AACCAAGGTCACCCCAGTTATCAGAGGAGCAA | |
| | sites (“C” spacer in | ACAGGGGCAAAGTCCACCGGGGGAGGCTGCTG | |
| | bold) | GTAAACATTAACCAAGGTCACCCCAGTTATCA | |
| | | GAGGAGCAAACAGGGGCAAAGTCCAC | |
| 3x_HNF4 | 3× repeat of | AGGGGAGGCTGCTGGTAAACATTAACCAAGGT | 2 |
| FOXA_v1 | HNF4_FOXA_v1 | CACCCCAGTTATCAGAGGAGCAAACAGGGGCA | |
| CpGmin | with CpG | AAGTCCACAGGGGGAGGCTGCTGGTAAACATT | |
| | minimization (“A” | AACCAAGGTCACCCCAGTTATCAGAGGAGCAA | |
| | spacer in bold) | ACAGGGGCAAAGTCCACAGGGGGAGGCTGCTG | |
| | | GTAAACATTAACCAAGGTCACCCCAGTTATCA | |
| | | GAGGAGCAAACAGGGGCAAAGTCCAT | |
| 3x_HNF4 | 3× repeat of | GAGGGAGGCTGCTGGTAAACATTAACCAAGGT | 3 |
| FOXA_v1 | HNF4_FOXA_v1 | CACCCAGTTATCAGAGGAGCAAACAGGGGCAA | |
| Secondary | with poly-C/poly-G | AGTCCACCGAGGGAGGCTGCTGGTAAACATTA | |
| Struct_min_ | minimization v1 (“C” | ACCAAGGTCACCCAGTTATCAGAGGAGCAAAC | |
| v1 | spacer in bold) | AGGGGCAAAGTCCACCGAGGGAGGCTGCTGGT | |
| | | AAACATTAACCAAGGTCACCCAGTTATCAGAG | |
| | | GAGCAAACAGGGGCAAAGTCCAC | |
| 3x_HNF4 | 3× repeat of | AGGGAGGCTGCTGGTAAACATTAACCAAGGTC | 4 |
| FOXA_v1 | HNF4_FOXA_v1 | ACCCAGTTATCAGAGGAGCAAACAGGGGCAAA | |
| Secondary | with poly-C/poly-G | GTCCACAGAGGGAGGCTGCTGGTAAACATTAA | |
| Struct_min_ | minimization and | CCAAGGTCACCCAGTTATCAGAGGAGCAAACA | |
| v1_CpG_min | CpG minimization v1 | GGGGCAAAGTCCACAGAGGGAGGCTGCTGGTA | |
| | (“A” spacer in bold) | AACATTAACCAAGGTCACCCAGTTATCAGAGG | |
| | | AGCAAACAGGGGCAAAGTCCAT | |
| 3x_HNF4 | 3× repeat of | GGGGGAGGCTGCTGGTAAACATTAACCAAGGT | 5 |
| FOXA_v1 | HNF4_FOXA_v1 | CACCTCAGTTATCAGAGGAGCAAACAGGGACA | |
| Secondary | with poly-C/poly-G | AAGTCCACCGGGGGAGGCTGCTGGTAAACATT | |
| Struct_min_ | minimization v2 (“C” | AACCAAGGTCACCTCAGTTATCAGAGGAGCAA | |
| v2 | spacer) | ACAGGGACAAAGTCCACCGGGGGAGGCTGCTG | |
| | | GTAAACATTAACCAAGGTCACCTCAGTTATCAG | |
| | | AGGAGCAAACAGGGACAAAGTCCAC | |
| 3x_HNF4 | 3× repeat of | AGGGGAGGCTGCTGGTAAACATTAACCAAGGT | 6 |
| FOXA_v1 | HNF4_FOXA_v1 | CACCTCAGTTATCAGAGGAGCAAACAGGGACA | |
| Secondary | with poly-C/poly-G | AAGTCCACAGGGGGAGGCTGCTGGTAAACATT | |
| Struct_min_ | minimization and | AACCAAGGTCACCTCAGTTATCAGAGGAGCAA | |
| v2_CpG_min | CpG minimization v2 | ACAGGGACAAAGTCCACAGGGGGAGGCTGCTG | |
| | (“A” spacer) | GTAAACATTAACCAAGGTCACCTCAGTTATCAG | |
| | | AGGAGCAAACAGGGACAAAGTCCACA | |
| 3x_HNF4 | 3× repeat of | GGGAGGCTGCTGGTAAACATTAACCAAGGTCA | 7 |
| FOXA_v1 | HNF4_FOXA_v1 | CCCCAGTTATCAGAGGAGCAAACAAGGGCAAA | |
| Secondary | with poly-C/poly-G | GTCCACCGGGAGGCTGCTGGTAAACATTAACC | |
| Struct_min_ | minimization v3 (“C” | AAGGTCACCCCAGTTATCAGAGGAGCAAACAA | |
| v3 | spacer) | GGGCAAAGTCCACCGGGAGGCTGCTGGTAAAC | |
| | | ATTAACCAAGGTCACCCCAGTTATCAGAGGAG | |
| | | CAAACAAGGGCAAAGTCCAC | |
| 3x_HNF4 | 3× repeat of | AGGGAGGCTGCTGGTAAACATTAACCAAGGTC | 8 |
| FOXA_v1 | HNF4_FOXA_v1 | ACCCCAGTTATCAGAGGAGCAAACAAGGGCAA | |
| Secondary | with poly-C/poly-G | AGTCCACAGGGAGGCTGCTGGTAAACATTAAC | |
| Struct_min_ | minimization and | CAAGGTCACCCCAGTTATCAGAGGAGCAAACA | |
| v3_CpG_min | CpG minimization v3 | AGGGCAAAGTCCACAGGGAGGCTGCTGGTAAA | |
| | (“A” spacer) | CATTAACCAAGGTCACCCCAGTTATCAGAGGA | |
| | | GCAAACAAGGGCAAAGTCCACA | |
| 3x_HNF4 | 3× repeat of | AGGAGGAGGCTGCTGGTAAACATTAACCAAGG | 9 |
| FOXA_v1 | HNF4_FOXA_v1 | TCACCTCAGTTATCAGAGGAGCAAACAGGGGC | |
| Secondary | with poly-C/poly-G | AAAGTCCACAGGAGGAGGCTGCTGGTAAACAT | |
| Struct_min_ | minimization v4 | TAACCAAGGTCACCTCAGTTATCAGAGGAGCA | |
| v4_Aspacers | (2585) | AACAGGGGCAAAGTCCACAGGAGGAGGCTGCT | |
| (no spacer | | GGTAAACATTAACCAAGGTCACCTCAGTTATCA | |
| inbetween | | GAGGAGCAAACAGGGGCAAAGTCCACA | |
| the repeats) | | | |
| 3x_HNF4 | 3× repeat of | AGGGGGAGGCTGCTGGTAAACATTAACCAAGG | 10 |
| FOXA_v1 | HNF4_FOXA_v1 | TCACCTCAGTTATCAGAGGAGCAAACAGGTGC | |
| Secondary | with poly-C/poly-G | AAAGTCCACAGGGGGAGGCTGCTGGTAAACAT | |
| Struct_min_ | minimization v5 | TAACCAAGGTCACCTCAGTTATCAGAGGAGCA | |
| v5_Aspacers | | AACAGGTGCAAAGTCCACAGGGGGAGGCTGCT | |
| (“A” spacer | | GGTAAACATTAACCAAGGTCACCTCAGTTATCA | |
| inbetween | | GAGGAGCAAACAGGTGCAAAGTCCACA | |
| the repeats) | | | |
| 3x_HNF4 | 3× repeat of | AGGAGGAGGCTGCTGGTAAACATTAACCAAGG | 11 |
| FOXA_v1 | HNF4_FOXA_v1 | TCACCCCAGTTATCAGAGGAGCAAACAGGTGC | |
| Secondary | with poly-C/poly-G | AAAGTCCACAGGAGGAGGCTGCTGGTAAACAT | |
| Struct_min_ | minimization v6 | TAACCAAGGTCACCCCAGTTATCAGAGGAGCA | |
| v6_Aspacers | | AACAGGTGCAAAGTCCACAGGAGGAGGCTGCT | |
| (“A” spacer | | GGTAAACATTAACCAAGGTCACCCCAGTTATC | |
| inbetween | | AGAGGAGCAAACAGGTGCAAAGTCCACA | |
| the repeats) | | | |
| 3x_Chinese | 3× repeat of the | GGAGGCTGTTGGTGAATATTAACCAAGGTCAC | 12 |
| TreeShrew | Chinese Tree Shrew | CTCAGTTATCGGAGGAGCAAACAAGGGCTAAG | |
| | SERPINA1 enhancer | TCCACCGGAGGCTGTTGGTGAATATTAACCAA | |
| | (“C” spancer | GGTCACCTCAGTTATCGGAGGAGCAAACAAGG | |
| | inbetween the | GCTAAGTCCACCGGAGGCTGTTGGTGAATATT | |
| | repeats) | AACCAAGGTCACCTCAGTTATCGGAGGAGCAA | |
| | | ACAAGGGCTAAGTCCAC | |
| 3x_Chinese | 3× repeat of the | AGGAGGCTGTTGGTGAATATTAACCAAGGTCA | 13 |
| TreeShrew | Chinese Tree Shrew | CCTCAGTTATCAGAGGAGCAAACAAGGGCTAA | |
| CpGmin | SERPINA1 enhancer | GTCCACAGGAGGCTGTTGGTGAATATTAACCA | |
| | with CpG | AGGTCACCTCAGTTATCAGAGGAGCAAACAAG | |
| | minimization (no | GGCTAAGTCCACAGGAGGCTGTTGGTGAATAT | |
| | spacer) | TAACCAAGGTCACCTCAGTTATCAGAGGAGCA | |
| | | AACAAGGGCTAAGTCCACA | |
| 3x_hSerpEn | 3× repeat of the | GGGGGAGGCTGCTGGTGAATATTAACCAAGGT | 14 |
| h_Aspacers | human SERPINA1 | CACCCCAGTTATCGGAGGAGCAAACAGGGGCT | |
| | enhancer with 1 | AAGTCCACAGGGGGAGGCTGCTGGTGAATATT | |
| | adenine between | AACCAAGGTCACCCCAGTTATCGGAGGAGCAA | |
| | repeats (“A” spacer) | ACAGGGGCTAAGTCCACAGGGGGAGGCTGCTG | |
| | | GTGAATATTAACCAAGGTCACCCCAGTTATCGG | |
| | | AGGAGCAAACAGGGGCTAAGTCCAC | |
| 3x_Bushba | 3× repeat of the | AGGGGAAGCTACTGGTGAATATTAACCAAGGT | 15 |
| by_Aspacers | Bushbaby | CACCCAGTTATCAGGGAGCAAACAGGAGCTAA | |
| | SERPINA1 enhancer | GTCCATAGGGGGAAGCTACTGGTGAATATTAA | |
| | with adenine | CCAAGGTCACCCAGTTATCAGGGAGCAAACAG | |
| | nucleotide spacer (no | GAGCTAAGTCCATAGGGGGAAGCTACTGGTGA | |
| | spacer) | ATATTAACCAAGGTCACCCAGTTATCAGGGAG | |
| | | CAAACAGGAGCTAAGTCCAT | |
| 5x_HNF4 | 5× repeat of | GGGGGAGGCTGCTGGTAAACATTAACCAAGGT | 16 |
| FOXA_v1 | HNF4_FOXA_v1 | CACCCCAGTTATCAGAGGAGCAAACAGGGGCA | |
| | (“C” spacer) | AAGTCCACCGGGGGAGGCTGCTGGTAAACATT | |
| | | AACCAAGGTCACCCCAGTTATCAGAGGAGCAA | |
| | | ACAGGGGCAAAGTCCACCGGGGGAGGCTGCTG | |
| | | GTAAACATTAACCAAGGTCACCCCAGTTATCA | |
| | | GAGGAGCAAACAGGGGCAAAGTCCACCGGGG | |
| | | GAGGCTGCTGGTAAACATTAACCAAGGTCACC | |
| | | CCAGTTATCAGAGGAGCAAACAGGGGCAAAGT | |
| | | CCACCGGGGGAGGCTGCTGGTAAACATTAACC | |
| | | AAGGTCACCCCAGTTATCAGAGGAGCAAACAG | |
| | | GGGCAAAGTCCAC | |
| 5x_HNF4 | 5× repeat of | GAGGGAGGCTGCTGGTAAACATTAACCAAGGT | 17 |
| FOXA_v1 | HNF4_FOXA_v1 | CACCCAGTTATCAGAGGAGCAAACAGGGGCAA | |
| Secondary | with poly-C/poly-G | AGTCCACCGAGGGAGGCTGCTGGTAAACATTA | |
| Struct_min_ | minimization v1 (“C” | ACCAAGGTCACCCAGTTATCAGAGGAGCAAAC | |
| v1 | spacer) | AGGGGCAAAGTCCACCGAGGGAGGCTGCTGGT | |
| | | AAACATTAACCAAGGTCACCCAGTTATCAGAG | |
| | | GAGCAAACAGGGGCAAAGTCCACCGAGGGAG | |
| | | GCTGCTGGTAAACATTAACCAAGGTCACCCAG | |
| | | TTATCAGAGGAGCAAACAGGGGCAAAGTCCAC | |
| | | CGAGGGAGGCTGCTGGTAAACATTAACCAAGG | |
| | | TCACCCAGTTATCAGAGGAGCAAACAGGGGCA | |
| | | AAGTCCAC | |
| 5x_HNF4 | 5× repeat of | AGGGAGGCTGCTGGTAAACATTAACCAAGGTC | 18 |
| FOXA_v1 | HNF4_FOXA_v1 | ACCCAGTTATCAGAGGAGCAAACAGGGGCAAA | |
| Secondary | with poly-C/poly-G | GTCCACAGAGGGAGGCTGCTGGTAAACATTAA | |
| Struct_min_ | minimization and | CCAAGGTCACCCAGTTATCAGAGGAGCAAACA | |
| v1_CpG_min | CpG minimization v1 | GGGGCAAAGTCCACAGAGGGAGGCTGCTGGTA | |
| | (″AG″ spacer) | AACATTAACCAAGGTCACCCAGTTATCAGAGG | |
| | | AGCAAACAGGGGCAAAGTCCACAGAGGGAGG | |
| | | CTGCTGGTAAACATTAACCAAGGTCACCCAGTT | |
| | | ATCAGAGGAGCAAACAGGGGCAAAGTCCACA | |
| | | GAGGGAGGCTGCTGGTAAACATTAACCAAGGT | |
| | | CACCCAGTTATCAGAGGAGCAAACAGGGGCAA | |
| | | AGTCCAT | |
| 5x_HNF4 | 5× repeat of | GGGGGAGGCTGCTGGTAAACATTAACCAAGGT | 19 |
| FOXA_v1 | HNF4_FOXA_v1 | CACCTCAGTTATCAGAGGAGCAAACAGGGACA | |
| Secondary | with poly-C/poly-G | AAGTCCACCGGGGGAGGCTGCTGGTAAACATT | |
| Struct_min_ | minimization v2 (“C” | AACCAAGGTCACCTCAGTTATCAGAGGAGCAA | |
| v2 | spacer) | ACAGGGACAAAGTCCACCGGGGGAGGCTGCTG | |
| | | GTAAACATTAACCAAGGTCACCTCAGTTATCAG | |
| | | AGGAGCAAACAGGGACAAAGTCCACCGGGGG | |
| | | AGGCTGCTGGTAAACATTAACCAAGGTCACCT | |
| | | CAGTTATCAGAGGAGCAAACAGGGACAAAGTC | |
| | | CACCGGGGGAGGCTGCTGGTAAACATTAACCA | |
| | | AGGTCACCTCAGTTATCAGAGGAGCAAACAGG | |
| | | GACAAAGTCCAC | |
| 5x_HNF4 | 5× repeat of | AGGGGAGGCTGCTGGTAAACATTAACCAAGGT | 20 |
| FOXA_v1 | HNF4_FOXA_v1 | CACCTCAGTTATCAGAGGAGCAAACAGGGACA | |
| Secondary | with poly-C/poly-G | AAGTCCACAGGGGGAGGCTGCTGGTAAACATT | |
| Struct_min_ | minimization and | AACCAAGGTCACCTCAGTTATCAGAGGAGCAA | |
| v2_CpG_min | CpG minimization v2 | ACAGGGACAAAGTCCACAGGGGGAGGCTGCTG | |
| | (“A” spacer) | GTAAACATTAACCAAGGTCACCTCAGTTATCAG | |
| | | AGGAGCAAACAGGGACAAAGTCCACAGGGGG | |
| | | AGGCTGCTGGTAAACATTAACCAAGGTCACCT | |
| | | CAGTTATCAGAGGAGCAAACAGGGACAAAGTC | |
| | | CACAGGGGGAGGCTGCTGGTAAACATTAACCA | |
| | | AGGTCACCTCAGTTATCAGAGGAGCAAACAGG | |
| | | GACAAAGTCCACA | |
| 5x_HNF4 | 5× repeat of | GGGAGGCTGCTGGTAAACATTAACCAAGGTCA | 21 |
| FOXA_v1 | HNF4_FOXA_v1 | CCCCAGTTATCAGAGGAGCAAACAAGGGCAAA | |
| Secondary | with poly-C/poly-G | GTCCACCGGGAGGCTGCTGGTAAACATTAACC | |
| Struct_min_ | minimization v3 (“C” | AAGGTCACCCCAGTTATCAGAGGAGCAAACAA | |
| v3 | spacer) | GGGCAAAGTCCACCGGGAGGCTGCTGGTAAAC | |
| | | ATTAACCAAGGTCACCCCAGTTATCAGAGGAG | |
| | | CAAACAAGGGCAAAGTCCACCGGGAGGCTGCT | |
| | | GGTAAACATTAACCAAGGTCACCCCAGTTATC | |
| | | AGAGGAGCAAACAAGGGCAAAGTCCACCGGG | |
| | | AGGCTGCTGGTAAACATTAACCAAGGTCACCC | |
| | | CAGTTATCAGAGGAGCAAACAAGGGCAAAGTC | |
| | | CAC | |
| 5x_HNF4 | 5× repeat of | AGGGAGGCTGCTGGTAAACATTAACCAAGGTC | 22 |
| FOXA_v1 | HNF4_FOXA_v1 | ACCCCAGTTATCAGAGGAGCAAACAAGGGCAA | |
| Secondary | with poly-C/poly-G | AGTCCACAGGGAGGCTGCTGGTAAACATTAAC | |
| Struct_min_ | minimization and | CAAGGTCACCCCAGTTATCAGAGGAGCAAACA | |
| v3_CpG_min | CpG minimization v3 | AGGGCAAAGTCCACAGGGAGGCTGCTGGTAAA | |
| | | CATTAACCAAGGTCACCCCAGTTATCAGAGGA | |
| | | GCAAACAAGGGCAAAGTCCACAGGGAGGCTGC | |
| | | TGGTAAACATTAACCAAGGTCACCCCAGTTATC | |
| | | AGAGGAGCAAACAAGGGCAAAGTCCACAGGG | |
| | | AGGCTGCTGGTAAACATTAACCAAGGTCACCC | |
| | | CAGTTATCAGAGGAGCAAACAAGGGCAAAGTC | |
| | | CACA | |
| 5x_HNF4 | 5× repeat of | AGGAGGAGGCTGCTGGTAAACATTAACCAAGG | 23 |
| FOXA_v1 | HNF4_FOXA_v1 | TCACCTCAGTTATCAGAGGAGCAAACAGGGGC | |
| Secondary | with poly-C/poly-G | AAAGTCCACAGGAGGAGGCTGCTGGTAAACAT | |
| Struct_min_ | minimization v4 | TAACCAAGGTCACCTCAGTTATCAGAGGAGCA | |
| v4_Aspacers | | AACAGGGGCAAAGTCCACAGGAGGAGGCTGCT | |
| | | GGTAAACATTAACCAAGGTCACCTCAGTTATCA | |
| | | GAGGAGCAAACAGGGGCAAAGTCCACAGGAG | |
| | | GAGGCTGCTGGTAAACATTAACCAAGGTCACC | |
| | | TCAGTTATCAGAGGAGCAAACAGGGGCAAAGT | |
| | | CCACAGGAGGAGGCTGCTGGTAAACATTAACC | |
| | | AAGGTCACCTCAGTTATCAGAGGAGCAAACAG | |
| | | GGGCAAAGTCCACA | |
| 5x_HNF4 | 5× repeat of | AGGGGGAGGCTGCTGGTAAACATTAACCAAGG | 24 |
| FOXA_v1 | HNF4_FOXA_v1 | TCACCTCAGTTATCAGAGGAGCAAACAGGTGC | |
| Secondary | with poly-C/poly-G | AAAGTCCACAGGGGGAGGCTGCTGGTAAACAT | |
| Struct_min_ | minimization v5 | TAACCAAGGTCACCTCAGTTATCAGAGGAGCA | |
| v5_Aspacers | | AACAGGTGCAAAGTCCACAGGGGGAGGCTGCT | |
| | | GGTAAACATTAACCAAGGTCACCTCAGTTATCA | |
| | | GAGGAGCAAACAGGTGCAAAGTCCACAGGGG | |
| | | GAGGCTGCTGGTAAACATTAACCAAGGTCACC | |
| | | TCAGTTATCAGAGGAGCAAACAGGTGCAAAGT | |
| | | CCACAGGGGGAGGCTGCTGGTAAACATTAACC | |
| | | AAGGTCACCTCAGTTATCAGAGGAGCAAACAG | |
| | | GTGCAAAGTCCACA | |
| 5x_HNF4 | 5× repeat of | AGGAGGAGGCTGCTGGTAAACATTAACCAAGG | 25 |
| FOXA_v1 | HNF4_FOXA_v1 | TCACCCCAGTTATCAGAGGAGCAAACAGGTGC | |
| Secondary | with poly-C/poly-G | AAAGTCCACAGGAGGAGGCTGCTGGTAAACAT | |
| Struct_min_ | minimization v6 | TAACCAAGGTCACCCCAGTTATCAGAGGAGCA | |
| v6_Aspacers | | AACAGGTGCAAAGTCCACAGGAGGAGGCTGCT | |
| | | GGTAAACATTAACCAAGGTCACCCCAGTTATC | |
| | | AGAGGAGCAAACAGGTGCAAAGTCCACAGGA | |
| | | GGAGGCTGCTGGTAAACATTAACCAAGGTCAC | |
| | | CCCAGTTATCAGAGGAGCAAACAGGTGCAAAG | |
| | | TCCACAGGAGGAGGCTGCTGGTAAACATTAAC | |
| | | CAAGGTCACCCCAGTTATCAGAGGAGCAAACA | |
| | | GGTGCAAAGTCCACA | |
| 5x_Chinese | 5× repeat of the | GGAGGCTGTTGGTGAATATTAACCAAGGTCAC | 26 |
| TreeShrew | Chinese Tree Shrew | CTCAGTTATCGGAGGAGCAAACAAGGGCTAAG | |
| | SERPINA1 enhancer | TCCACCGGAGGCTGTTGGTGAATATTAACCAA | |
| | | GGTCACCTCAGTTATCGGAGGAGCAAACAAGG | |
| | | GCTAAGTCCACCGGAGGCTGTTGGTGAATATTA | |
| | | ACCAAGGTCACCTCAGTTATCGGAGGAGCAAA | |
| | | CAAGGGCTAAGTCCACCGGAGGCTGTTGGTGA | |
| | | ATATTAACCAAGGTCACCTCAGTTATCGGAGG | |
| | | AGCAAACAAGGGCTAAGTCCACCGGAGGCTGT | |
| | | TGGTGAATATTAACCAAGGTCACCTCAGTTATC | |
| | | GGAGGAGCAAACAAGGGCTAAGTCCAC | |
| 5x_Chinese | 5× repeat of the | AGGAGGCTGTTGGTGAATATTAACCAAGGTCA | 27 |
| TreeShrew | Chinese Tree Shrew | CCTCAGTTATCAGAGGAGCAAACAAGGGCTAA | |
| CpGmin | SERPINA1 enhancer | GTCCACAGGAGGCTGTTGGTGAATATTAACCA | |
| | with CpG | AGGTCACCTCAGTTATCAGAGGAGCAAACAAG | |
| | minimization | GGCTAAGTCCACAGGAGGCTGTTGGTGAATAT | |
| | | TAACCAAGGTCACCTCAGTTATCAGAGGAGCA | |
| | | AACAAGGGCTAAGTCCACAGGAGGCTGTTGGT | |
| | | GAATATTAACCAAGGTCACCTCAGTTATCAGA | |
| | | GGAGCAAACAAGGGCTAAGTCCACAGGAGGCT | |
| | | GTTGGTGAATATTAACCAAGGTCACCTCAGTTA | |
| | | TCAGAGGAGCAAACAAGGGCTAAGTCCACA | |
| 5x_Bushba | 5× repeat of the | AGGGGAAGCTACTGGTGAATATTAACCAAGGT | 28 |
| by_Aspacers | Bushbaby | CACCCAGTTATCAGGGAGCAAACAGGAGCTAA | |
| | SERPINA1 enhancer | GTCCATAGGGGGAAGCTACTGGTGAATATTAA | |
| | with adenenine | CCAAGGTCACCCAGTTATCAGGGAGCAAACAG | |
| | nucleotide spacer | GAGCTAAGTCCATAGGGGGAAGCTACTGGTGA | |
| | | ATATTAACCAAGGTCACCCAGTTATCAGGGAG | |
| | | CAAACAGGAGCTAAGTCCATAGGGGGAAGCTA | |
| | | CTGGTGAATATTAACCAAGGTCACCCAGTTATC | |
| | | AGGGAGCAAACAGGAGCTAAGTCCATAGGGGG | |
| | | AAGCTACTGGTGAATATTAACCAAGGTCACCC | |
| | | AGTTATCAGGGAGCAAACAGGAGCTAAGTCCA | |
| | | T | |
| 5x_hSerpEnh | 5× repeat of the | GGGGGAGGCTGCTGGTGAATATTAACCAAGGT | 29 |
| | human SERPINA1 | CACCCCAGTTATCGGAGGAGCAAACAGGGGCT | |
| | enhancer | AAGTCCACCGGGGGAGGCTGCTGGTGAATATT | |
| | | AACCAAGGTCACCCCAGTTATCGGAGGAGCAA | |
| | | ACAGGGGCTAAGTCCACCGGGGGAGGCTGCTG | |
| | | GTGAATATTAACCAAGGTCACCCCAGTTATCGG | |
| | | AGGAGCAAACAGGGGCTAAGTCCACCGGGGGA | |
| | | GGCTGCTGGTGAATATTAACCAAGGTCACCCC | |
| | | AGTTATCGGAGGAGCAAACAGGGGCTAAGTCC | |
| | | ACCGGGGGAGGCTGCTGGTGAATATTAACCAA | |
| | | GGTCACCCCAGTTATCGGAGGAGCAAACAGGG | |
| | | GCTAAGTCCAC | |
| 10x_HNF4_ | 10× repeat of | GGGGGAGGCTGCTGGTAAACATTAACCAAGGT | 30 |
| FOXA_v1 | HNF4_FOXA_v1 | CACCCCAGTTATCAGAGGAGCAAACAGGGGCA | |
| | | AAGTCCACCGGGGGAGGCTGCTGGTAAACATT | |
| | | AACCAAGGTCACCCCAGTTATCAGAGGAGCAA | |
| | | ACAGGGGCAAAGTCCACCGGGGGAGGCTGCTG | |
| | | GTAAACATTAACCAAGGTCACCCCAGTTATCA | |
| | | GAGGAGCAAACAGGGGCAAAGTCCACCGGGG | |
| | | GAGGCTGCTGGTAAACATTAACCAAGGTCACC | |
| | | CCAGTTATCAGAGGAGCAAACAGGGGCAAAGT | |
| | | CCACCGGGGGAGGCTGCTGGTAAACATTAACC | |
| | | AAGGTCACCCCAGTTATCAGAGGAGCAAACAG | |
| | | GGGCAAAGTCCACCGGGGGAGGCTGCTGGTAA | |
| | | ACATTAACCAAGGTCACCCCAGTTATCAGAGG | |
| | | AGCAAACAGGGGCAAAGTCCACCGGGGGAGG | |
| | | CTGCTGGTAAACATTAACCAAGGTCACCCCAGT | |
| | | TATCAGAGGAGCAAACAGGGGCAAAGTCCACC | |
| | | GGGGGAGGCTGCTGGTAAACATTAACCAAGGT | |
| | | CACCCCAGTTATCAGAGGAGCAAACAGGGGCA | |
| | | AAGTCCACCGGGGGAGGCTGCTGGTAAACATT | |
| | | AACCAAGGTCACCCCAGTTATCAGAGGAGCAA | |
| | | ACAGGGGCAAAGTCCACCGGGGGAGGCTGCTG | |
| | | GTAAACATTAACCAAGGTCACCCCAGTTATCA | |
| | | GAGGAGCAAACAGGGGCAAAGTCCAC | |
| 10x_HNF4_ | 10× repeat of | GAGGGAGGCTGCTGGTAAACATTAACCAAGGT | 31 |
| _FOXA_v1_ | HNF4_FOXA_v1 | CACCCAGTTATCAGAGGAGCAAACAGGGGCAA | |
| Secondary | with poly-C/poly-G | AGTCCACCGAGGGAGGCTGCTGGTAAACATTA | |
| Struct_ | minimization v1 | ACCAAGGTCACCCAGTTATCAGAGGAGCAAAC | |
| min_v1 | | AGGGGCAAAGTCCACCGAGGGAGGCTGCTGGT | |
| | | AAACATTAACCAAGGTCACCCAGTTATCAGAG | |
| | | GAGCAAACAGGGGCAAAGTCCACCGAGGGAG | |
| | | GCTGCTGGTAAACATTAACCAAGGTCACCCAG | |
| | | TTATCAGAGGAGCAAACAGGGGCAAAGTCCAC | |
| | | CGAGGGAGGCTGCTGGTAAACATTAACCAAGG | |
| | | TCACCCAGTTATCAGAGGAGCAAACAGGGGCA | |
| | | AAGTCCACCGAGGGAGGCTGCTGGTAAACATT | |
| | | AACCAAGGTCACCCAGTTATCAGAGGAGCAAA | |
| | | CAGGGGCAAAGTCCACCGAGGGAGGCTGCTGG | |
| | | TAAACATTAACCAAGGTCACCCAGTTATCAGA | |
| | | GGAGCAAACAGGGGCAAAGTCCACCGAGGGA | |
| | | GGCTGCTGGTAAACATTAACCAAGGTCACCCA | |
| | | GTTATCAGAGGAGCAAACAGGGGCAAAGTCCA | |
| | | CCGAGGGAGGCTGCTGGTAAACATTAACCAAG | |
| | | GTCACCCAGTTATCAGAGGAGCAAACAGGGGC | |
| | | AAAGTCCACCGAGGGAGGCTGCTGGTAAACAT | |
| | | TAACCAAGGTCACCCAGTTATCAGAGGAGCAA | |
| | | ACAGGGGCAAAGTCCAC | |
| 10x_HNF4_ | 10× repeat of | AGGGAGGCTGCTGGTAAACATTAACCAAGGTC | |
| FOXA_v1_ | HNF4_FOXA_v1 | ACCCAGTTATCAGAGGAGCAAACAGGGGCAAA | |
| Secondary | with poly-C/poly-G | GTCCACAGAGGGAGGCTGCTGGTAAACATTAA | |
| Struct_min_ | minimization and | CCAAGGTCACCCAGTTATCAGAGGAGCAAACA | 32 |
| v1_CpG_min | CpG minimization v1 | GGGGCAAAGTCCACAGAGGGAGGCTGCTGGTA | |
| | | AACATTAACCAAGGTCACCCAGTTATCAGAGG | |
| | | AGCAAACAGGGGCAAAGTCCACAGAGGGAGG | |
| | | CTGCTGGTAAACATTAACCAAGGTCACCCAGTT | |
| | | ATCAGAGGAGCAAACAGGGGCAAAGTCCACAG | |
| | | AGGGAGGCTGCTGGTAAACATTAACCAAGGTC | |
| | | ACCCAGTTATCAGAGGAGCAAACAGGGGCAAA | |
| | | GTCCACAGAGGGAGGCTGCTGGTAAACATTAA | |
| | | CCAAGGTCACCCAGTTATCAGAGGAGCAAACA | |
| | | GGGGCAAAGTCCACAGAGGGAGGCTGCTGGTA | |
| | | AACATTAACCAAGGTCACCCAGTTATCAGAGG | |
| | | AGCAAACAGGGGCAAAGTCCACAGAGGGAGG | |
| | | CTGCTGGTAAACATTAACCAAGGTCACCCAGTT | |
| | | ATCAGAGGAGCAAACAGGGGCAAAGTCCACAG | |
| | | AGGGAGGCTGCTGGTAAACATTAACCAAGGTC | |
| | | ACCCAGTTATCAGAGGAGCAAACAGGGGCAAA | |
| | | GTCCACAGAGGGAGGCTGCTGGTAAACATTAA | |
| | | CCAAGGTCACCCAGTTATCAGAGGAGCAAACA | |
| | | GGGGCAAAGTCCAT | |
| 10x_HNF4_ | 10× repeat of | GGGGGAGGCTGCTGGTAAACATTAACCAAGGT | 33 |
| FOXA_v1_ | HNF4_FOXA_v1 | CACCTCAGTTATCAGAGGAGCAAACAGGGACA | |
| Secondary_ | with poly-C/poly-G | AAGTCCACCGGGGGAGGCTGCTGGTAAACATT | |
| Struct_min_ | minimization v2 | AACCAAGGTCACCTCAGTTATCAGAGGAGCAA | |
| v2 | | ACAGGGACAAAGTCCACCGGGGGAGGCTGCTG | |
| | | GTAAACATTAACCAAGGTCACCTCAGTTATCAG | |
| | | AGGAGCAAACAGGGACAAAGTCCACCGGGGG | |
| | | AGGCTGCTGGTAAACATTAACCAAGGTCACCT | |
| | | CAGTTATCAGAGGAGCAAACAGGGACAAAGTC | |
| | | CACCGGGGGAGGCTGCTGGTAAACATTAACCA | |
| | | AGGTCACCTCAGTTATCAGAGGAGCAAACAGG | |
| | | GACAAAGTCCACCGGGGGAGGCTGCTGGTAAA | |
| | | CATTAACCAAGGTCACCTCAGTTATCAGAGGA | |
| | | GCAAACAGGGACAAAGTCCACCGGGGGAGGCT | |
| | | GCTGGTAAACATTAACCAAGGTCACCTCAGTTA | |
| | | TCAGAGGAGCAAACAGGGACAAAGTCCACCGG | |
| | | GGGAGGCTGCTGGTAAACATTAACCAAGGTCA | |
| | | CCTCAGTTATCAGAGGAGCAAACAGGGACAAA | |
| | | GTCCACCGGGGGAGGCTGCTGGTAAACATTAA | |
| | | CCAAGGTCACCTCAGTTATCAGAGGAGCAAAC | |
| | | AGGGACAAAGTCCACCGGGGGAGGCTGCTGGT | |
| | | AAACATTAACCAAGGTCACCTCAGTTATCAGA | |
| | | GGAGCAAACAGGGACAAAGTCCAC | |
| 10x_HNF4_ | 10× repeat of | AGGGGAGGCTGCTGGTAAACATTAACCAAGGT | 34 |
| FOXA_v1_ | HNF4_FOXA_v1 | CACCTCAGTTATCAGAGGAGCAAACAGGGACA | |
| Secondary_ | with poly-C/poly-G | AAGTCCACAGGGGGAGGCTGCTGGTAAACATT | |
| Struct_min_ | minimization and | AACCAAGGTCACCTCAGTTATCAGAGGAGCAA | |
| v2_CpG_min | CpG minimization v2 | ACAGGGACAAAGTCCACAGGGGGAGGCTGCTG | |
| | | GTAAACATTAACCAAGGTCACCTCAGTTATCAG | |
| | | AGGAGCAAACAGGGACAAAGTCCACAGGGGG | |
| | | AGGCTGCTGGTAAACATTAACCAAGGTCACCT | |
| | | CAGTTATCAGAGGAGCAAACAGGGACAAAGTC | |
| | | CACAGGGGGAGGCTGCTGGTAAACATTAACCA | |
| | | AGGTCACCTCAGTTATCAGAGGAGCAAACAGG | |
| | | GACAAAGTCCACAGGGGGAGGCTGCTGGTAAA | |
| | | CATTAACCAAGGTCACCTCAGTTATCAGAGGA | |
| | | GCAAACAGGGACAAAGTCCACAGGGGGAGGCT | |
| | | GCTGGTAAACATTAACCAAGGTCACCTCAGTTA | |
| | | TCAGAGGAGCAAACAGGGACAAAGTCCACAGG | |
| | | GGGAGGCTGCTGGTAAACATTAACCAAGGTCA | |
| | | CCTCAGTTATCAGAGGAGCAAACAGGGACAAA | |
| | | GTCCACAGGGGGAGGCTGCTGGTAAACATTAA | |
| | | CCAAGGTCACCTCAGTTATCAGAGGAGCAAAC | |
| | | AGGGACAAAGTCCACAGGGGGAGGCTGCTGGT | |
| | | AAACATTAACCAAGGTCACCTCAGTTATCAGA | |
| | | GGAGCAAACAGGGACAAAGTCCACA | |
| 10x_HNF4_ | 10× repeat of | GGGAGGCTGCTGGTAAACATTAACCAAGGTCA | 35 |
| FOXA_v1_ | HNF4_FOXA_v1 | CCCCAGTTATCAGAGGAGCAAACAAGGGCAAA | |
| Secondary_ | with poly-C/poly-G | GTCCACCGGGAGGCTGCTGGTAAACATTAACC | |
| Struct_min | minimization v3 | AAGGTCACCCCAGTTATCAGAGGAGCAAACAA | |
| _v3 | | GGGCAAAGTCCACCGGGAGGCTGCTGGTAAAC | |
| | | ATTAACCAAGGTCACCCCAGTTATCAGAGGAG | |
| | | CAAACAAGGGCAAAGTCCACCGGGAGGCTGCT | |
| | | GGTAAACATTAACCAAGGTCACCCCAGTTATC | |
| | | AGAGGAGCAAACAAGGGCAAAGTCCACCGGG | |
| | | AGGCTGCTGGTAAACATTAACCAAGGTCACCC | |
| | | CAGTTATCAGAGGAGCAAACAAGGGCAAAGTC | |
| | | CACCGGGAGGCTGCTGGTAAACATTAACCAAG | |
| | | GTCACCCCAGTTATCAGAGGAGCAAACAAGGG | |
| | | CAAAGTCCACCGGGAGGCTGCTGGTAAACATT | |
| | | AACCAAGGTCACCCCAGTTATCAGAGGAGCAA | |
| | | ACAAGGGCAAAGTCCACCGGGAGGCTGCTGGT | |
| | | AAACATTAACCAAGGTCACCCCAGTTATCAGA | |
| | | GGAGCAAACAAGGGCAAAGTCCACCGGGAGG | |
| | | CTGCTGGTAAACATTAACCAAGGTCACCCCAGT | |
| | | TATCAGAGGAGCAAACAAGGGCAAAGTCCACC | |
| | | GGGAGGCTGCTGGTAAACATTAACCAAGGTCA | |
| | | CCCCAGTTATCAGAGGAGCAAACAAGGGCAAA | |
| | | GTCCAC | |
| 10x_HNF4 | 10× repeat of | AGGGAGGCTGCTGGTAAACATTAACCAAGGTC | 36 |
| _FOXA_v1_ | HNF4_FOXA_v1 | ACCCCAGTTATCAGAGGAGCAAACAAGGGCAA | |
| Secondary_ | with poly-C/poly-G | AGTCCACAGGGAGGCTGCTGGTAAACATTAAC | |
| Struct_min_ | minimization and | CAAGGTCACCCCAGTTATCAGAGGAGCAAACA | |
| v3_CpG_min | CpG minimization v3 | AGGGCAAAGTCCACAGGGAGGCTGCTGGTAAA | |
| | | CATTAACCAAGGTCACCCCAGTTATCAGAGGA | |
| | | GCAAACAAGGGCAAAGTCCACAGGGAGGCTGC | |
| | | TGGTAAACATTAACCAAGGTCACCCCAGTTATC | |
| | | AGAGGAGCAAACAAGGGCAAAGTCCACAGGG | |
| | | AGGCTGCTGGTAAACATTAACCAAGGTCACCC | |
| | | CAGTTATCAGAGGAGCAAACAAGGGCAAAGTC | |
| | | CACAGGGAGGCTGCTGGTAAACATTAACCAAG | |
| | | GTCACCCCAGTTATCAGAGGAGCAAACAAGGG | |
| | | CAAAGTCCACAGGGAGGCTGCTGGTAAACATT | |
| | | AACCAAGGTCACCCCAGTTATCAGAGGAGCAA | |
| | | ACAAGGGCAAAGTCCACAGGGAGGCTGCTGGT | |
| | | AAACATTAACCAAGGTCACCCCAGTTATCAGA | |
| | | GGAGCAAACAAGGGCAAAGTCCACAGGGAGG | |
| | | CTGCTGGTAAACATTAACCAAGGTCACCCCAGT | |
| | | TATCAGAGGAGCAAACAAGGGCAAAGTCCACA | |
| | | GGGAGGCTGCTGGTAAACATTAACCAAGGTCA | |
| | | CCCCAGTTATCAGAGGAGCAAACAAGGGCAAA | |
| | | GTCCACA | |
| 10x_ | 10× repeat of the | GGGGGAGGCTGCTGGTGAATATTAACCAAGGT | 37 |
| hSerpEnh | human SERPINA1 | CACCCCAGTTATCGGAGGAGCAAACAGGGGCT | |
| | enhancer (“C” | AAGTCCACCGGGGGAGGCTGCTGGTGAATATT | |
| | spacer) | AACCAAGGTCACCCCAGTTATCGGAGGAGCAA | |
| | | ACAGGGGCTAAGTCCACCGGGGGAGGCTGCTG | |
| | | GTGAATATTAACCAAGGTCACCCCAGTTATCGG | |
| | | AGGAGCAAACAGGGGCTAAGTCCACCGGGGG | |
| | | AGGCTGCTGGTGAATATTAACCAAGGTCACCC | |
| | | CAGTTATCGGAGGAGCAAACAGGGGCTAAGTC | |
| | | CACCGGGGGAGGCTGCTGGTGAATATTAACCA | |
| | | AGGTCACCCCAGTTATCGGAGGAGCAAACAGG | |
| | | GGCTAAGTCCACCGGGGGAGGCTGCTGGTGAA | |
| | | TATTAACCAAGGTCACCCCAGTTATCGGAGGA | |
| | | GCAAACAGGGGCTAAGTCCACCGGGGGAGGCT | |
| | | GCTGGTGAATATTAACCAAGGTCACCCCAGTTA | |
| | | TCGGAGGAGCAAACAGGGGCTAAGTCCACCGG | |
| | | GGGAGGCTGCTGGTGAATATTAACCAAGGTCA | |
| | | CCCCAGTTATCGGAGGAGCAAACAGGGGCTAA | |
| | | GTCCACCGGGGGAGGCTGCTGGTGAATATTAA | |
| | | CCAAGGTCACCCCAGTTATCGGAGGAGCAAAC | |
| | | AGGGGCTAAGTCCACCGGGGGAGGCTGCTGGT | |
| | | GAATATTAACCAAGGTCACCCCAGTTATCGGA | |
| | | GGAGCAAACAGGGGCTAAGTCCAC | |
| 10x_ | 10× repeat of the | AGGGGAAGCTACTGGTGAATATTAACCAAGGT | 38 |
| Bushbaby_ | Bushbaby | CACCCAGTTATCAGGGAGCAAACAGGAGCTAA | |
| Aspacers | SERPINA1 enhancer | GTCCATAGGGGGAAGCTACTGGTGAATATTAA | |
| | with adenenine | CCAAGGTCACCCAGTTATCAGGGAGCAAACAG | |
| | nucleotide spacer | GAGCTAAGTCCATAGGGGGAAGCTACTGGTGA | |
| | | ATATTAACCAAGGTCACCCAGTTATCAGGGAG | |
| | | CAAACAGGAGCTAAGTCCATAGGGGGAAGCTA | |
| | | CTGGTGAATATTAACCAAGGTCACCCAGTTATC | |
| | | AGGGAGCAAACAGGAGCTAAGTCCATAGGGGG | |
| | | AAGCTACTGGTGAATATTAACCAAGGTCACCC | |
| | | AGTTATCAGGGAGCAAACAGGAGCTAAGTCCA | |
| | | TAGGGGGAAGCTACTGGTGAATATTAACCAAG | |
| | | GTCACCCAGTTATCAGGGAGCAAACAGGAGCT | |
| | | AAGTCCATAGGGGGAAGCTACTGGTGAATATT | |
| | | AACCAAGGTCACCCAGTTATCAGGGAGCAAAC | |
| | | AGGAGCTAAGTCCATAGGGGGAAGCTACTGGT | |
| | | GAATATTAACCAAGGTCACCCAGTTATCAGGG | |
| | | AGCAAACAGGAGCTAAGTCCATAGGGGGAAGC | |
| | | TACTGGTGAATATTAACCAAGGTCACCCAGTTA | |
| | | TCAGGGAGCAAACAGGAGCTAAGTCCATAGGG | |
| | | GGAAGCTACTGGTGAATATTAACCAAGGTCAC | |
| | | CCAGTTATCAGGGAGCAAACAGGAGCTAAGTC | |
| | | CAT | |
| Bushbaby_ | Bushbaby | GGGGGAAGCTACTGGTGAATATTAACCAAGGT | 39 |
| HN4F/FOX | SERPINA1 enhancer, | CACCCAGTTATCAGGGAGCAAACAGGAGCTAA | |
| v1_ | FOXA_HNF4_v1 | GTCCATAGGGGGAGGCTGCTGGTAAACATTAA | |
| HNF4mod | enhancer, HNF4 | CCAAGGTCACCCCAGTTATCAGAGGAGCAAAC | |
| | consensus binding | AGGGGCAAAGTCCACAGAGGGAGGCTGCTGGT | |
| | site enhancer | GAATATTAACCAAGGTCACCTCAGTTATCAGA | |
| | | GGAGCAAACAGGGGCAAAGTCCAT | |
| HNF4mod_ | HNF4 consensus | AGAGGGAGGCTGCTGGTGAATATTAACCAAGG | 40 |
| Bushbaby | binding site enhancer, | TCACCTCAGTTATCAGAGGAGCAAACAGGGGC | |
| Mod_HN4F/ | Bushbaby | AAAGTCCATAGAGGGAAGCTACTGGTGAATAT | |
| FOXv1 | SERPINA1 enhancer, | TAACCAAGGTCACCCAGTTATCAGGGAGCAAA | |
| | FOXA_HNF4_v1 | CAGGAGCTAAGTCCATAGGGGGAGGCTGCTGG | |
| | enhancer | TAAACATTAACCAAGGTCACCCCAGTTATCAG | |
| | | AGGAGCAAACAGGGGCAAAGTCCAC | |
| 3x_ | 3× repeat of | GGGGGAGGCTGCTGGTGAATATTAACCAAGGT | 41 |
| hSerpEnh_ | hSerpEnh with 2mer | CACCCCAGTTATCGGAGGAGCAAACAGGGGCT | |
| 2mer_ | spacers v1 (bold | AAGTCCACAAGGGGGAGGCTGCTGGTGAATAT | |
| spacers_v1 | underlined) | TAACCAAGGTCACCCCAGTTATCGGAGGAGCA | |
| | | AACAGGGGCTAAGTCCACCAGGGGGAGGCTGC | |
| | | TGGTGAATATTAACCAAGGTCACCCCAGTTATC | |
| | | GGAGGAGCAAACAGGGGCTAAGTCCAC | |
| 3x_hSerpEn | 3× repeat of | GGGGGAGGCTGCTGGTGAATATTAACCAAGGT | 42 |
| h_2mer_ | hSerpEnh with 2mer | CACCCCAGTTATCGGAGGAGCAAACAGGGGCT | |
| spacers_ | spacers v2 (bold | AAGTCCACAAGGGGGAGGCTGCTGGTGAATAT | |
| v2 | underlined) | TAACCAAGGTCACCCCAGTTATCGGAGGAGCA | |
| | | AACAGGGGCTAAGTCCACCTGGGGGAGGCTGC | |
| | | TGGTGAATATTAACCAAGGTCACCCCAGTTATC | |
| | | GGAGGAGCAAACAGGGGCTAAGTCCAC | |
| 3x_hSerpEnh | 3× repeat of | GGGGGAGGCTGCTGGTGAATATTAACCAAGGT | 43 |
| _2mer_ | hSerpEnh with 2mer | CACCCCAGTTATCGGAGGAGCAAACAGGGGCT | |
| spacers_ | spacers v3 (bold | AAGTCCACAAGGGGGAGGCTGCTGGTGAATAT | |
| v3 | underlined) | TAACCAAGGTCACCCCAGTTATCGGAGGAGCA | |
| | | AACAGGGGCTAAGTCCACTAGGGGGAGGCTGC | |
| | | TGGTGAATATTAACCAAGGTCACCCCAGTTATC | |
| | | GGAGGAGCAAACAGGGGCTAAGTCCAC | |
| 3x_hSerpEnh | 3× repeat of | GGGGGAGGCTGCTGGTGAATATTAACCAAGGT | 44 |
| _2mer_ | hSerpEnh with 2mer | CACCCCAGTTATCGGAGGAGCAAACAGGGGCT | |
| spacers | spacers v4 (bold | AAGTCCACAAGGGGGAGGCTGCTGGTGAATAT | |
| _v4 | underlined) | TAACCAAGGTCACCCCAGTTATCGGAGGAGCA | |
| | | AACAGGGGCTAAGTCCACTTGGGGGAGGCTGC | |
| | | TGGTGAATATTAACCAAGGTCACCCCAGTTATC | |
| | | GGAGGAGCAAACAGGGGCTAAGTCCAC | |
| 3x_hSerpEnh | 3× repeat of | GGGGGAGGCTGCTGGTGAATATTAACCAAGGT | 45 |
| _2mer_spa | hSerpEnh with 2mer | CACCCCAGTTATCGGAGGAGCAAACAGGGGCT | |
| cers_v5 | spacers v5 (bold | AAGTCCACCAGGGGGAGGCTGCTGGTGAATAT | |
| | underlined) | TAACCAAGGTCACCCCAGTTATCGGAGGAGCA | |
| | | AACAGGGGCTAAGTCCACAAGGGGGAGGCTGC | |
| | | TGGTGAATATTAACCAAGGTCACCCCAGTTATC | |
| | | GGAGGAGCAAACAGGGGCTAAGTCCAC | |
| 3x_hSerpEnh | 3× repeat of | GGGGGAGGCTGCTGGTGAATATTAACCAAGGT | 46 |
| _2mer_ | hSerpEnh with 2mer | CACCCCAGTTATCGGAGGAGCAAACAGGGGCT | |
| spacers_ | spacers v6 (bold | AAGTCCACCAGGGGGAGGCTGCTGGTGAATAT | |
| v6 | underlined) | TAACCAAGGTCACCCCAGTTATCGGAGGAGCA | |
| | | AACAGGGGCTAAGTCCACCTGGGGGAGGCTGC | |
| | | TGGTGAATATTAACCAAGGTCACCCCAGTTATC | |
| | | GGAGGAGCAAACAGGGGCTAAGTCCAC | |
| 3x_hSerpEnh | 3× repeat of | GGGGGAGGCTGCTGGTGAATATTAACCAAGGT | 47 |
| _2mer_ | hSerpEnh with 2mer | CACCCCAGTTATCGGAGGAGCAAACAGGGGCT | |
| spacers_v7 | spacers v7 (bold | AAGTCCACCAGGGGGAGGCTGCTGGTGAATAT | |
| | underlined) | TAACCAAGGTCACCCCAGTTATCGGAGGAGCA | |
| | | AACAGGGGCTAAGTCCACTAGGGGGAGGCTGC | |
| | | TGGTGAATATTAACCAAGGTCACCCCAGTTATC | |
| | | GGAGGAGCAAACAGGGGCTAAGTCCAC | |
| 3x_hSerpEnh | 3× repeat of | GGGGGAGGCTGCTGGTGAATATTAACCAAGGT | 48 |
| _2mer_ | hSerpEnh with 2mer | CACCCCAGTTATCGGAGGAGCAAACAGGGGCT | |
| spacers_v8 | spacers v8 (bold | AAGTCCACCAGGGGGAGGCTGCTGGTGAATAT | |
| | underlined) | TAACCAAGGTCACCCCAGTTATCGGAGGAGCA | |
| | | AACAGGGGCTAAGTCCACTTGGGGGAGGCTGC | |
| | | TGGTGAATATTAACCAAGGTCACCCCAGTTATC | |
| | | GGAGGAGCAAACAGGGGCTAAGTCCAC | |
| 3x_hSerpEnh | 3× repeat of | GGGGGAGGCTGCTGGTGAATATTAACCAAGGT | 49 |
| _2mer_ | hSerpEnh with 2mer | CACCCCAGTTATCGGAGGAGCAAACAGGGGCT | |
| spacers_v9 | spacers v9 (bold | AAGTCCACCTGGGGGAGGCTGCTGGTGAATAT | |
| | underlined) | TAACCAAGGTCACCCCAGTTATCGGAGGAGCA | |
| | | AACAGGGGCTAAGTCCACAAGGGGGAGGCTGC | |
| | | TGGTGAATATTAACCAAGGTCACCCCAGTTATC | |
| | | GGAGGAGCAAACAGGGGCTAAGTCCAC | |
| 3x_hSerpEnh | 3× repeat of | GGGGGAGGCTGCTGGTGAATATTAACCAAGGT | 50 |
| _2mer_ | hSerpEnh with 2mer | CACCCCAGTTATCGGAGGAGCAAACAGGGGCT | |
| spacers_v10 | spacers v10 (bold | AAGTCCACCTGGGGGAGGCTGCTGGTGAATAT | |
| | underlined) | TAACCAAGGTCACCCCAGTTATCGGAGGAGCA | |
| | | AACAGGGGCTAAGTCCACCAGGGGGAGGCTGC | |
| | | TGGTGAATATTAACCAAGGTCACCCCAGTTATC | |
| | | GGAGGAGCAAACAGGGGCTAAGTCCAC | |
| 3x_hSerpEnh | 3× repeat of | GGGGGAGGCTGCTGGTGAATATTAACCAAGGT | 51 |
| _2mer_ | hSerpEnh with 2mer | CACCCCAGTTATCGGAGGAGCAAACAGGGGCT | |
| spacers_v11 | spacers v11 (bold | AAGTCCACCTGGGGGAGGCTGCTGGTGAATAT | |
| | underlined) | TAACCAAGGTCACCCCAGTTATCGGAGGAGCA | |
| | | AACAGGGGCTAAGTCCACTAGGGGGAGGCTGC | |
| | | TGGTGAATATTAACCAAGGTCACCCCAGTTATC | |
| | | GGAGGAGCAAACAGGGGCTAAGTCCAC | |
| 3x_hSerpEnh | 3× repeat of | GGGGGAGGCTGCTGGTGAATATTAACCAAGGT | 52 |
| _2mer_ | hSerpEnh with 2mer | CACCCCAGTTATCGGAGGAGCAAACAGGGGCT | |
| spacers_v12 | spacers v12 (bold | AAGTCCACCTGGGGGAGGCTGCTGGTGAATAT | |
| | underlined) | TAACCAAGGTCACCCCAGTTATCGGAGGAGCA | |
| | | AACAGGGGCTAAGTCCACTTGGGGGAGGCTGC | |
| | | TGGTGAATATTAACCAAGGTCACCCCAGTTATC | |
| | | GGAGGAGCAAACAGGGGCTAAGTCCAC | |
| 3x_hSerpEnh | 3× repeat of | GGGGGAGGCTGCTGGTGAATATTAACCAAGGT | 53 |
| _2mer_ | hSerpEnh with 2mer | CACCCCAGTTATCGGAGGAGCAAACAGGGGCT | |
| spacers_v13 | spacers v13 (bold | AAGTCCACTAGGGGGAGGCTGCTGGTGAATAT | |
| | underlined) | TAACCAAGGTCACCCCAGTTATCGGAGGAGCA | |
| | | AACAGGGGCTAAGTCCACAAGGGGGAGGCTGC | |
| | | TGGTGAATATTAACCAAGGTCACCCCAGTTATC | |
| | | GGAGGAGCAAACAGGGGCTAAGTCCAC | |
| 3x_hSerpEnh | 3× repeat of | GGGGGAGGCTGCTGGTGAATATTAACCAAGGT | 54 |
| _2mer_ | hSerpEnh with 2mer | CACCCCAGTTATCGGAGGAGCAAACAGGGGCT | |
| spacers_v14 | spacers v14 (bold | AAGTCCACTAGGGGGAGGCTGCTGGTGAATAT | |
| | underlined) | TAACCAAGGTCACCCCAGTTATCGGAGGAGCA | |
| | | AACAGGGGCTAAGTCCACCAGGGGGAGGCTGC | |
| | | TGGTGAATATTAACCAAGGTCACCCCAGTTATC | |
| | | GGAGGAGCAAACAGGGGCTAAGTCCAC | |
| 3x_hSerpEnh | 3× repeat of | GGGGGAGGCTGCTGGTGAATATTAACCAAGGT | 55 |
| _2mer_ | hSerpEnh with 2mer | CACCCCAGTTATCGGAGGAGCAAACAGGGGCT | |
| spacers_v15 | spacers v15 (bold | AAGTCCACTAGGGGGAGGCTGCTGGTGAATAT | |
| | underlined) | TAACCAAGGTCACCCCAGTTATCGGAGGAGCA | |
| | | AACAGGGGCTAAGTCCACCTGGGGGAGGCTGC | |
| | | TGGTGAATATTAACCAAGGTCACCCCAGTTATC | |
| | | GGAGGAGCAAACAGGGGCTAAGTCCAC | |
| 3x_hSerpEnh | 3× repeat of | GGGGGAGGCTGCTGGTGAATATTAACCAAGGT | 56 |
| _2mer_ | hSerpEnh with 2mer | CACCCCAGTTATCGGAGGAGCAAACAGGGGCT | |
| spacers_v16 | spacers v16 (bold | AAGTCCACTAGGGGGAGGCTGCTGGTGAATAT | |
| | underlined) | TAACCAAGGTCACCCCAGTTATCGGAGGAGCA | |
| | | AACAGGGGCTAAGTCCACTTGGGGGAGGCTGC | |
| | | TGGTGAATATTAACCAAGGTCACCCCAGTTATC | |
| | | GGAGGAGCAAACAGGGGCTAAGTCCAC | |
| 3x_hSerpEnh | 3× repeat of | GGGGGAGGCTGCTGGTGAATATTAACCAAGGT | 57 |
| _2mer_ | hSerpEnh with 2mer | CACCCCAGTTATCGGAGGAGCAAACAGGGGCT | |
| spacers_v17 | spacers v17 (bold | AAGTCCACTTGGGGGAGGCTGCTGGTGAATAT | |
| | underlined) | TAACCAAGGTCACCCCAGTTATCGGAGGAGCA | |
| | | AACAGGGGCTAAGTCCACAAGGGGGAGGCTGC | |
| | | TGGTGAATATTAACCAAGGTCACCCCAGTTATC | |
| | | GGAGGAGCAAACAGGGGCTAAGTCCAC | |
| 3x_hSerpEnh | 3× repeat of | GGGGGAGGCTGCTGGTGAATATTAACCAAGGT | 58 |
| _2mer_spacers | hSerpEnh with 2mer | CACCCCAGTTATCGGAGGAGCAAACAGGGGCT | |
| _v18 | spacers v18 (bold | AAGTCCACTTGGGGGAGGCTGCTGGTGAATAT | |
| | underlined) | TAACCAAGGTCACCCCAGTTATCGGAGGAGCA | |
| | | AACAGGGGCTAAGTCCACCAGGGGGAGGCTGC | |
| | | TGGTGAATATTAACCAAGGTCACCCCAGTTATC | |
| | | GGAGGAGCAAACAGGGGCTAAGTCCAC | |
| 3x_hSerpEnh | 3× repeat of | GGGGGAGGCTGCTGGTGAATATTAACCAAGGT | 59 |
| _2mer_ | hSerpEnh with 2mer | CACCCCAGTTATCGGAGGAGCAAACAGGGGCT | |
| spacers_v19 | spacers v19 (bold | AAGTCCACTTGGGGGAGGCTGCTGGTGAATAT | |
| | underlined) | TAACCAAGGTCACCCCAGTTATCGGAGGAGCA | |
| | | AACAGGGGCTAAGTCCACCTGGGGGAGGCTGC | |
| | | TGGTGAATATTAACCAAGGTCACCCCAGTTATC | |
| | | GGAGGAGCAAACAGGGGCTAAGTCCAC | |
| 3x_hSerpEnh | 3× repeat of | GGGGGAGGCTGCTGGTGAATATTAACCAAGGT | 60 |
| _2mer_ | hSerpEnh with 2mer | CACCCCAGTTATCGGAGGAGCAAACAGGGGCT | |
| spacers_v20 | spacers v20 (bold | AAGTCCACTTGGGGGAGGCTGCTGGTGAATAT | |
| | underlined) | TAACCAAGGTCACCCCAGTTATCGGAGGAGCA | |
| | | AACAGGGGCTAAGTCCACTAGGGGGAGGCTGC | |
| | | TGGTGAATATTAACCAAGGTCACCCCAGTTATC | |
| | | GGAGGAGCAAACAGGGGCTAAGTCCAC | |
| 3x_hSerpEnh | 3× repeat of | GGGGGAGGCTGCTGGTGAATATTAACCAAGGT | 61 |
| _3mer_ | hSerpEnh with 3mer | CACCCCAGTTATCGGAGGAGCAAACAGGGGCT | |
| spacers_v1 | spacers v1 (bold | AAGTCCACTTAGGGGGAGGCTGCTGGTGAATA | |
| | underlined) | TTAACCAAGGTCACCCCAGTTATCGGAGGAGC | |
| | | AAACAGGGGCTAAGTCCACTGTGGGGGAGGCT | |
| | | GCTGGTGAATATTAACCAAGGTCACCCCAGTTA | |
| | | TCGGAGGAGCAAACAGGGGCTAAGTCCAC | |
| 3x_hSerpEnh | 3× repeat of | GGGGGAGGCTGCTGGTGAATATTAACCAAGGT | 62 |
| _3mer_ | hSerpEnh with 3mer | CACCCCAGTTATCGGAGGAGCAAACAGGGGCT | |
| spacers_v2 | spacers v2 (bold | AAGTCCACAGAGGGGGAGGCTGCTGGTGAATA | |
| | underlined) | TTAACCAAGGTCACCCCAGTTATCGGAGGAGC | |
| | | AAACAGGGGCTAAGTCCACTGAGGGGGAGGCT | |
| | | GCTGGTGAATATTAACCAAGGTCACCCCAGTTA | |
| | | TCGGAGGAGCAAACAGGGGCTAAGTCCAC | |
| 3x_hSerpEnh | 3× repeat of | GGGGGAGGCTGCTGGTGAATATTAACCAAGGT | 63 |
| _3mer_ | hSerpEnh with 3mer | CACCCCAGTTATCGGAGGAGCAAACAGGGGCT | |
| spacers_v3 | spacers v3 (bold | AAGTCCACACTGGGGGAGGCTGCTGGTGAATA | |
| | underlined) | TTAACCAAGGTCACCCCAGTTATCGGAGGAGC | |
| | | AAACAGGGGCTAAGTCCACCAAGGGGGAGGCT | |
| | | GCTGGTGAATATTAACCAAGGTCACCCCAGTTA | |
| | | TCGGAGGAGCAAACAGGGGCTAAGTCCAC | |
| 3x_hSerpEnh | 3× repeat of | GGGGGAGGCTGCTGGTGAATATTAACCAAGGT | 64 |
| _5mer_ | hSerpEnh with 5mer | CACCCCAGTTATCGGAGGAGCAAACAGGGGCT | |
| spacers_v1 | spacers v1 (bold | AAGTCCACACATAGGGGGAGGCTGCTGGTGAA | |
| | underlined) | TATTAACCAAGGTCACCCCAGTTATCGGAGGA | |
| | | GCAAACAGGGGCTAAGTCCACCTGTAGGGGGA | |
| | | GGCTGCTGGTGAATATTAACCAAGGTCACCCC | |
| | | AGTTATCGGAGGAGCAAACAGGGGCTAAGTCC | |
| | | AC | |
| 3x_hSerpEnh | 3× repeat of | GGGGGAGGCTGCTGGTGAATATTAACCAAGGT | |
| _5mer_ | hSerpEnh with 5mer | CACCCCAGTTATCGGAGGAGCAAACAGGGGCT | |
| spacers_v2 | spacers v2 (bold | AAGTCCACAACAAGGGGGAGGCTGCTGGTGAA | |
| | underlined) | TATTAACCAAGGTCACCCCAGTTATCGGAGGA | |
| | | GCAAACAGGGGCTAAGTCCACCATCAGGGGGA | |
| | | GGCTGCTGGTGAATATTAACCAAGGTCACCCC | 65 |
| | | AGTTATCGGAGGAGCAAACAGGGGCTAAGTCC | |
| | | AC | |
| 3x_hSerpEnh | 3× repeat of | GGGGGAGGCTGCTGGTGAATATTAACCAAGGT | 66 |
| _5mer_ | hSerpEnh with 5mer | CACCCCAGTTATCGGAGGAGCAAACAGGGGCT | |
| spacers_v3 | spacers v3 (bold | AAGTCCACCAATTGGGGGAGGCTGCTGGTGAA | |
| | underlined) | TATTAACCAAGGTCACCCCAGTTATCGGAGGA | |
| | | GCAAACAGGGGCTAAGTCCACTTGCTGGGGGA | |
| | | GGCTGCTGGTGAATATTAACCAAGGTCACCCC | |
| | | AGTTATCGGAGGAGCAAACAGGGGCTAAGTCC | |
| | | AC | |
| 3x_hSerpEnh | 3× repeat of | GGGGGAGGCTGCTGGTGAATATTAACCAAGGT | 67 |
| _11mer_ | hSerpEnh with 11mer | CACCCCAGTTATCGGAGGAGCAAACAGGGGCT | |
| spacers_v1 | spacers v1 (bold | AAGTCCACCCTTGGGACCAGGGGGAGGCTGC | |
| | underlined) | TGGTGAATATTAACCAAGGTCACCCCAGTTATC | |
| | | GGAGGAGCAAACAGGGGCTAAGTCCACAAGC | |
| | | TGTTCCAGGGGGAGGCTGCTGGTGAATATTAA | |
| | | CCAAGGTCACCCCAGTTATCGGAGGAGCAAAC | |
| | | AGGGGCTAAGTCCAC | |
| 3x_hSerpEnh | 3× repeat of | GGGGGAGGCTGCTGGTGAATATTAACCAAGGT | 68 |
| _11mer_ | hSerpEnh with 11mer | CACCCCAGTTATCGGAGGAGCAAACAGGGGCT | |
| spacers_v2 | spacers v2 (bold | AAGTCCACAGGCTGGTTGAGGGGGAGGCTGC | |
| | underlined) | TGGTGAATATTAACCAAGGTCACCCCAGTTATC | |
| | | GGAGGAGCAAACAGGGGCTAAGTCCACTGATA | |
| | | ATAGCTGGGGGAGGCTGCTGGTGAATATTAAC | |
| | | CAAGGTCACCCCAGTTATCGGAGGAGCAAACA | |
| | | GGGGCTAAGTCCAC | |
| 3x_hSerpEnh | 3× repeat of | GGGGGAGGCTGCTGGTGAATATTAACCAAGGT | 69 |
| _11mer_ | hSerpEnh with 11mer | CACCCCAGTTATCGGAGGAGCAAACAGGGGCT | |
| spacers_v3 | spacers v3 (bold | AAGTCCACCATTCTGCTTTGGGGGAGGCTGCT | |
| | underlined) | GGTGAATATTAACCAAGGTCACCCCAGTTATCG | |
| | | GAGGAGCAAACAGGGGCTAAGTCCACTTGATT | |
| | | AAGAAGGGGGAGGCTGCTGGTGAATATTAACC | |
| | | AAGGTCACCCCAGTTATCGGAGGAGCAAACAG | |
| | | GGGCTAAGTCCAC | |
| 3x_hSerpEnh | 3× repeat of | GGGGGAGGCTGCTGGTGAATATTAACCAAGGT | 70 |
| _11mer_ | hSerpEnh with 11mer | CACCCCAGTTATCGGAGGAGCAAACAGGGGCT | |
| spacers_HNF | spacers (bold | AAGTCCACAACAAAGTCCAGGGGGAGGCTGCT | |
| 4former_ | underlined) with | GGTGAATATTAACCAAGGTCACCCCAGTTATCG | |
| spacers_FOX | HNF4 binding site in | GAGGAGCAAACAGGGGCTAAGTCCACCTTGTA | |
| Afor | orientation 1 & | AACAAGGGGGAGGCTGCTGGTGAATATTAACC | |
| | FOXA binding site in | AAGGTCACCCCAGTTATCGGAGGAGCAAACAG | |
| | orientation 1 | GGGCTAAGTCCAC | |
| 3x_hSerpEnh | 3× repeat of | GGGGGAGGCTGCTGGTGAATATTAACCAAGGT | 71 |
| _11mer_ | hSerpEnh with 11mer | CACCCCAGTTATCGGAGGAGCAAACAGGGGCT | |
| spacers_HNF | spacers (bold | AAGTCCACTGCAAAGTCCTGGGGGAGGCTGCT | |
| 4former_ | underlined) with | GGTGAATATTAACCAAGGTCACCCCAGTTATCG | |
| spacers_FOX | HNF4 binding site in | GAGGAGCAAACAGGGGCTAAGTCCACAGTGTT | |
| Arev | orientation 1 & | TACAAGGGGGAGGCTGCTGGTGAATATTAACC | |
| | FOXA binding site in | AAGGTCACCCCAGTTATCGGAGGAGCAAACAG | |
| | orientation 2 | GGGCTAAGTCCAC | |
| 3x_hSerpEnh | 3× repeat of | GGGGGAGGCTGCTGGTGAATATTAACCAAGGT | 72 |
| _11mer_ | hSerpEnh with 11mer | CACCCCAGTTATCGGAGGAGCAAACAGGGGCT | |
| spacers_HNF | spacers (bold | AAGTCCACAGGACTTTGAAGGGGGAGGCTGCT | |
| 4revmer_ | underlined) with | GGTGAATATTAACCAAGGTCACCCCAGTTATCG | |
| spacers_FOX | HNF4 binding site in | GAGGAGCAAACAGGGGCTAAGTCCACAGTGT | |
| Afor | orientation 2 & | AAACAAGGGGGAGGCTGCTGGTGAATATTAAC | |
| | FOXA binding site in | CAAGGTCACCCCAGTTATCGGAGGAGCAAACA | |
| | orientation 1 | GGGGCTAAGTCCAC | |
| 3x_hSerpEnh | 3× repeat of | GGGGGAGGCTGCTGGTGAATATTAACCAAGGT | 73 |
| _11mer_ | hSerpEnh with 11mer | CACCCCAGTTATCGGAGGAGCAAACAGGGGCT | |
| spacers_HNF | spacers (bold | AAGTCCACTGGACTTTGGTGGGGGAGGCTGCT | |
| 4revmer_ | underlined) with | GGTGAATATTAACCAAGGTCACCCCAGTTATCG | |
| spacers_FOX | HNF4 binding site in | GAGGAGCAAACAGGGGCTAAGTCCACTCTGTT | |
| Arev | orientation 2 & | TACAAGGGGGAGGCTGCTGGTGAATATTAACC | |
| | FOXA binding site in | AAGGTCACCCCAGTTATCGGAGGAGCAAACAG | |
| | orientation 2 | GGGCTAAGTCCAC | |
| 3x_hSerpEnh | 3× repeat of | GGGGGAGGCTGCTGGTGAATATTAACCAAGGT | 74 |
| _30mer_ | hSerpEnh with 30mer | CACCCCAGTTATCGGAGGAGCAAACAGGGGCT | |
| spacers_v1 | spacers v1 (bold | AAGTCCACCTGCTTGACATCTGCAGTAATCT | |
| | underlined) | TTGATTAGGGGGAGGCTGCTGGTGAATATTAA | |
| | | CCAAGGTCACCCCAGTTATCGGAGGAGCAAAC | |
| | | AGGGGCTAAGTCCACCTCTGATACTTTGATAT | |
| | | CTAGTCTACTGCTGGGGGAGGCTGCTGGTGAA | |
| | | TATTAACCAAGGTCACCCCAGTTATCGGAGGA | |
| | | GCAAACAGGGGCTAAGTCCAC | |
| 3x_hSerpEnh | 3× repeat of | GGGGGAGGCTGCTGGTGAATATTAACCAAGGT | 75 |
| _30mer_ | hSerpEnh with 30mer | CACCCCAGTTATCGGAGGAGCAAACAGGGGCT | |
| spacers_v2 | spacers v2 (bold | AAGTCCACCACTTGTATTTAATCATAACTACT | |
| | underlined) | TAGCAAGGGGGAGGCTGCTGGTGAATATTAAC | |
| | | CAAGGTCACCCCAGTTATCGGAGGAGCAAACA | |
| | | GGGGCTAAGTCCACTAACATCTTACAAACTAA | |
| | | AGTTAGATAGTAGGGGGAGGCTGCTGGTGAAT | |
| | | ATTAACCAAGGTCACCCCAGTTATCGGAGGAG | |
| | | CAAACAGGGGCTAAGTCCAC | |
| 3x_hSerpEnh | 3× repeat of | GGGGGAGGCTGCTGGTGAATATTAACCAAGGT | 76 |
| _30mer_ | hSerpEnh with 30mer | CACCCCAGTTATCGGAGGAGCAAACAGGGGCT | |
| spacers_v3 | spacers v3 (bold | AAGTCCACATAGAAGAATTTCTTACATTGTGT | |
| | underlined) | GAACCTGGGGGAGGCTGCTGGTGAATATTAAC | |
| | | CAAGGTCACCCCAGTTATCGGAGGAGCAAACA | |
| | | GGGGCTAAGTCCACATTGAAGTGCAAAGTCA | |
| | | CTAATATTAAGCAGGGGGAGGCTGCTGGTGAA | |
| | | TATTAACCAAGGTCACCCCAGTTATCGGAGGA | |
| | | GCAAACAGGGGCTAAGTCCAC | |
| 3x_hSerpEnh | 3× repeat of | GGGGGAGGCTGCTGGTGAATATTAACCAAGGT | 77 |
| _30mer_ | hSerpEnh with 30mer | CACCCCAGTTATCGGAGGAGCAAACAGGGGCT | |
| spacers_HNF | spacers (bold | AAGTCCACATAATTAAAGTCAAAGTCCTCAC | |
| 4former_ | underlined) with | TGCTAGTGGGGGAGGCTGCTGGTGAATATTAA | |
| spacers_FOX | HNF4 binding site in | CCAAGGTCACCCCAGTTATCGGAGGAGCAAAC | |
| Afor | orientation 1 & | AGGGGCTAAGTCCACACAATTAGAGCTGTAA | |
| | FOXA binding site in | ACATAATTTGTGTAGGGGGAGGCTGCTGGTGA | |
| | orientation 1 | ATATTAACCAAGGTCACCCCAGTTATCGGAGG | |
| | | AGCAAACAGGGGCTAAGTCCAC | |
| 3x_hSerpEnh | 3× repeat of | GGGGGAGGCTGCTGGTGAATATTAACCAAGGT | 78 |
| _30mer_ | hSerpEnh with 30mer | CACCCCAGTTATCGGAGGAGCAAACAGGGGCT | |
| spacers_HNF | spacers (bold | AAGTCCACTTATTTGCACTCAAAGTCCACTTT | |
| 4former_ | underlined) with | ATTACAGGGGGAGGCTGCTGGTGAATATTAAC | |
| spacers_FOX | HNF4 binding site in | CAAGGTCACCCCAGTTATCGGAGGAGCAAACA | |
| Arev | orientation 1 & | GGGGCTAAGTCCACTCAATCATAAGTGTTTAC | |
| | FOXA binding site in | AAGTTTAAGATTGGGGGAGGCTGCTGGTGAAT | |
| | orientation 2 | ATTAACCAAGGTCACCCCAGTTATCGGAGGAG | |
| | | CAAACAGGGGCTAAGTCCAC | |
| 3x_hSerpEnh | 3× repeat of | GGGGGAGGCTGCTGGTGAATATTAACCAAGGT | 79 |
| _30mer_ | hSerpEnh with 30mer | CACCCCAGTTATCGGAGGAGCAAACAGGGGCT | |
| spacers_HNF | spacers (bold | AAGTCCACAGTTGCTGTGTGGACTTTGTCAC | |
| 4revmer_ | underlined) with | TGCAAGAGGGGGAGGCTGCTGGTGAATATTAA | |
| spacers_FOX | HNF4 binding site in | CCAAGGTCACCCCAGTTATCGGAGGAGCAAAC | |
| Afor | orientation 2 & | AGGGGCTAAGTCCACAACAGCATATTTGTAAA | |
| | FOXA binding site in | CAGTTCTATTAGTGGGGGAGGCTGCTGGTGAA | |
| | orientation 1 | TATTAACCAAGGTCACCCCAGTTATCGGAGGA | |
| | | GCAAACAGGGGCTAAGTCCAC | |
| 3x_hSerpEnh | 3× repeat of | GGGGGAGGCTGCTGGTGAATATTAACCAAGGT | 80 |
| _30mer_ | hSerpEnh with 30mer | CACCCCAGTTATCGGAGGAGCAAACAGGGGCT | |
| spacers_HNF | spacers (bold | AAGTCCACATTAACTATTGGGACTTTGGTTA | |
| 4revmer_ | underlined) with | ACAACAAGGGGGAGGCTGCTGGTGAATATTAA | |
| spacers_FOX | HNF4 binding site in | CCAAGGTCACCCCAGTTATCGGAGGAGCAAAC | |
| Arev | orientation 2 & | AGGGGCTAAGTCCACCAGAGACTTATTGTTTA | |
| | FOXA binding site in | CAGCTAACTATCTGGGGGAGGCTGCTGGTGAA | |
| | orientation 2 | TATTAACCAAGGTCACCCCAGTTATCGGAGGA | |
| | | GCAAACAGGGGCTAAGTCCAC | |
| 3x_Tibetan | 3 repeats of | GGGGGAGGCTGCTGGTAAACATTAACCAAGGT | 138 |
| antelope_ | SERPINA1 enhancer | CACCCCAGTTATCAGAGGAACAAACAAGGACT | |
| SERPINA1 | from tibetan | AAGTCCATTGGGGGAGGCTGCTGGTAAACATT | |
| enhancer | antelope, | AACCAAGGTCACCCCAGTTATCAGAGGAACAA | |
| | separated by T. | ACAAGGACTAAGTCCATTGGGGGAGGCTGCTG | |
| | | GTAAACATTAACCAAGGTCACCCCAGTTATCA | |
| | | GAGGAACAAACAAGGACTAAGTCCAT | |
| 3x_Armadil | 3 repeats of | GGGGGAGGCTGCTAGTGAACATTAACCAAGGT | 139 |
| 1o_CpGmin_ | SERPINA1 enhancer | CACCCAGTTATCAGAGGAGCAAACAGGGACTA | |
| SERPINA1_ | from armadillo with | AGTCCACTGGGGGAGGCTGCTAGTGAACATTA | |
| enhancer | CpG removed, | ACCAAGGTCACCCAGTTATCAGAGGAGCAAAC | |
| | separated by T. | AGGGACTAAGTCCACTGGGGGAGGCTGCTAGT | |
| | | GAACATTAACCAAGGTCACCCAGTTATCAGAG | |
| | | GAGCAAACAGGGACTAAGTCCAC | |

[0205] In some embodiments, the expression cassette comprises a regulatory element (e.g., an enhancer) comprising 3× repeat of the human SERPINA1 enhancer with FOXA & HNF4 consensus sites. In certain embodiment, the regulatory element comprising the 3× repeat of the human SERPINA1 enhancer with FOXA & HNF4 consensus sites comprises SEQ ID NO: 1.

[0206] In some embodiments, the expression cassette comprises a regulatory element (e.g., an enhancer) comprising 3× repeat of HNF4_FOXA_v1 with CpG minimization. In certain embodiment, the regulatory element comprising the 3× repeat of HNF4_FOXA_v1 with CpG minimization comprises SEQ ID NO: 2.

[0207] In some embodiments, the expression cassette comprises a regulatory element (e.g., an enhancer) comprising 3× repeat of HNF4_FOXA_v1 with poly-C/poly-G minimization v1. In certain embodiment, the regulatory element comprising the 3× repeat of HNF4_FOXA_v1 with poly-C/poly-G minimization v1 comprises SEQ ID NO: 3.

[0208] In some embodiments, the expression cassette comprises a regulatory element (e.g., an enhancer) comprising 3× repeat of HNF4_FOXA_v1 with poly-C/poly-G minimization and CpG minimization v1. In certain embodiment, the regulatory element comprising the 3× repeat of HNF4_FOXA_v1 with poly-C/poly-G minimization and CpG minimization v1 comprises SEQ ID NO: 4.

[0209] In some embodiments, the expression cassette comprises a regulatory element (e.g., an enhancer) comprising 3× repeat of HNF4_FOXA_v1 with poly-C/poly-G minimization v2. In certain embodiment, the regulatory element comprising the 3× repeat of HNF4_FOXA_v1 with poly-C/poly-G minimization v2 comprises SEQ ID NO: 5.

[0210] In some embodiments, the expression cassette comprises a regulatory element (e.g., an enhancer) comprising 3× repeat of HNF4_FOXA_v1 with poly-C/poly-G minimization and CpG minimization v2. In certain embodiment, the regulatory element comprising the 3× repeat of HNF4_FOXA_v1 with poly-C/poly-G minimization and CpG minimization v2 comprises SEQ ID NO: 6.

[0211] In some embodiments, the expression cassette comprises a regulatory element (e.g., an enhancer) comprising 3× repeat of HNF4_FOXA_v1 with poly-C/poly-G minimization v3. In certain embodiment, the regulatory element comprising the 3× repeat of HNF4_FOXA_v1 with poly-C/poly-G minimization v3 comprises SEQ ID NO: 7.

[0212] In some embodiments, the expression cassette comprises a regulatory element (e.g., an enhancer) comprising 3× repeat of HNF4_FOXA_v1 with poly-C/poly-G minimization and CpG minimization v3. In certain embodiment, the regulatory element comprising the 3× repeat of HNF4_FOXA_v1 with poly-C/poly-G minimization and CpG minimization v3 comprises SEQ ID NO: 8.

[0213] In some embodiments, the expression cassette comprises a regulatory element (e.g., an enhancer) comprising 3× repeat of HNF4_FOXA_v1 with poly-C/poly-G minimization v4. In certain embodiment, the regulatory element comprising the 3× repeat of HNF4_FOXA_v1 with poly-C/poly-G minimization v4 comprises SEQ ID NO: 9.

[0214] In some embodiments, the expression cassette comprises a regulatory element (e.g., an enhancer) comprising 3× repeat of HNF4_FOXA_v1 with poly-C/poly-G minimization v5. In certain embodiment, the regulatory element comprising the 3× repeat of HNF4_FOXA_v1 with poly-C/poly-G minimization v5 comprises SEQ ID NO: 10.

[0215] In some embodiments, the expression cassette comprises a regulatory element (e.g., an enhancer) comprising 3× repeat of HNF4_FOXA_v1 with poly-C/poly-G minimization v6. In certain embodiment, the regulatory element comprising the 3× repeat of HNF4_FOXA_v1 with poly-C/poly-G minimization v6 comprises SEQ ID NO: 11.

[0216] In some embodiments, the expression cassette comprises a regulatory element (e.g., an enhancer) comprising 3× repeat of the Chinese Tree Shrew SERPINA1 enhancer. In certain embodiment, the regulatory element comprising the 3× repeat of the Chinese Tree Shrew SERPINA1 enhancer comprises SEQ ID NO: 12.

[0217] In some embodiments, the expression cassette comprises a regulatory element (e.g., an enhancer) comprising 3× repeat of the Chinese Tree Shrew SERPINA1 enhancer with CpG minimization. In certain embodiment, the regulatory element comprising the 3× repeat of the Chinese Tree Shrew SERPINA1 enhancer with CpG minimization comprises SEQ ID NO: 13.

[0218] In some embodiments, the expression cassette comprises a regulatory element (e.g., an enhancer) comprising 3× repeat of the human SERPINA1 enhancer with 1 adenine between repeats. In certain embodiment, the regulatory element comprising the 3× repeat of the human SERPINA1 enhancer with 1 adenine between repeats comprises SEQ ID NO: 14.

[0219] In some embodiments, the expression cassette comprises a regulatory element (e.g., an enhancer) comprising 3× repeat of the Bushbaby SERPINA1 enhancer with adenine nucleotide spacer. In certain embodiment, the regulatory element comprising the 3× repeat of the Bushbaby SERPINA1 enhancer with adenine nucleotide spacer comprises SEQ ID NO: 15.

[0220] In some embodiments, the expression cassette comprises a regulatory element (e.g., an enhancer) comprising 5× repeat of HNF4_FOXA_v1. In certain embodiment, the regulatory element comprising the 5× repeat of HNF4_FOXA_v1 comprises SEQ ID NO: 16.

[0221] In some embodiments, the expression cassette comprises a regulatory element (e.g., an enhancer) comprising 5× repeat of HNF4_FOXA_v1 with poly-C/poly-G minimization v1. In certain embodiment, the regulatory element comprising the 5× repeat of HNF4_FOXA_v1 with poly-C/poly-G minimization v1 comprises SEQ ID NO: 17.

[0222] In some embodiments, the expression cassette comprises a regulatory element (e.g., an enhancer) comprising 5× repeat of HNF4_FOXA_v1 with poly-C/poly-G minimization and CpG minimization v1. In certain embodiment, the regulatory element comprising the 5× repeat of HNF4_FOXA_v1 with poly-C/poly-G minimization and CpG minimization v1 comprises SEQ ID NO: 18.

[0223] In some embodiments, the expression cassette comprises a regulatory element (e.g., an enhancer) comprising 5× repeat of HNF4_FOXA_v1 with poly-C/poly-G minimization v2. In certain embodiment, the regulatory element comprising the 5× repeat of HNF4_FOXA_v1 with poly-C/poly-G minimization v2 comprises SEQ ID NO: 19.

[0224] In some embodiments, the expression cassette comprises a regulatory element (e.g., an enhancer) comprising 5× repeat of HNF4_FOXA_v1 with poly-C/poly-G minimization and CpG minimization v2. In certain embodiment, the regulatory element comprising the 5× repeat of HNF4_FOXA_v1 with poly-C/poly-G minimization and CpG minimization v2 comprises SEQ ID NO: 20.

[0225] In some embodiments, the expression cassette comprises a regulatory element (e.g., an enhancer) comprising 5× repeat of HNF4_FOXA_v1 with poly-C/poly-G minimization v3. In certain embodiment, the regulatory element comprising the 5× repeat of HNF4_FOXA_v1 with poly-C/poly-G minimization v3 comprises SEQ ID NO: 21.

[0226] In some embodiments, the expression cassette comprises a regulatory element (e.g., an enhancer) comprising 5× repeat of HNF4_FOXA_v1 with poly-C/poly-G minimization and CpG minimization v3. In certain embodiment, the regulatory element comprising the 5× repeat of HNF4_FOXA_v1 with poly-C/poly-G minimization and CpG minimization v3 comprises SEQ ID NO: 22.

[0227] In some embodiments, the expression cassette comprises a regulatory element (e.g., an enhancer) comprising 5× repeat of HNF4_FOXA_v1 with poly-C/poly-G minimization v4. In certain embodiment, the regulatory element comprising the 5× repeat of HNF4_FOXA_v1 with poly-C/poly-G minimization v4 comprises SEQ ID NO: 23.

[0228] In some embodiments, the expression cassette comprises a regulatory element (e.g., an enhancer) comprising 5× repeat of HNF4_FOXA_v1 with poly-C/poly-G minimization v5. In certain embodiment, the regulatory element comprising the 5× repeat of HNF4_FOXA_v1 with poly-C/poly-G minimization v5 comprises SEQ ID NO: 24.

[0229] In some embodiments, the expression cassette comprises a regulatory element (e.g., an enhancer) comprising 5× repeat of HNF4_FOXA_v1 with poly-C/poly-G minimization v6. In certain embodiment, the regulatory element comprising the 5× repeat of HNF4_FOXA_v1 with poly-C/poly-G minimization v6 comprises SEQ ID NO: 25.

[0230] In some embodiments, the expression cassette comprises a regulatory element (e.g., an enhancer) comprising 5× repeat of the Chinese Tree Shrew SERPINA1 enhancer. In certain embodiment, the regulatory element comprising the 5× repeat of the Chinese Tree Shrew SERPINA1 enhancer comprises SEQ ID NO: 26.

[0231] In some embodiments, the expression cassette comprises a regulatory element (e.g., an enhancer) comprising 5× repeat of the Chinese Tree Shrew SERPINA1 enhancer with CpG minimization. In certain embodiment, the regulatory element comprising the 5× repeat of the Chinese Tree Shrew SERPINA1 enhancer with CpG minimization comprises SEQ ID NO: 27.

[0232] In some embodiments, the expression cassette comprises a regulatory element (e.g., an enhancer) comprising 5× repeat of the Bushbaby SERPINA1 enhancer with adenenine nucleotide spacer. In certain embodiment, the regulatory element comprising the 5× repeat of the Bushbaby SERPINA1 enhancer with adenenine nucleotide spacer comprises SEQ ID NO: 28.

[0233] In some embodiments, the expression cassette comprises a regulatory element (e.g., an enhancer) comprising 5× repeat of the human SERPINA1 enhancer. In certain embodiment, the regulatory element comprising the 5× repeat of the human SERPINA1 enhancer comprises SEQ ID NO: 29.

[0234] In some embodiments, the expression cassette comprises a regulatory element (e.g., an enhancer) comprising 10× repeat of HNF4_FOXA_v1. In certain embodiment, the regulatory element comprising the 10× repeat of HNF4_FOXA_v1 comprises SEQ ID NO: 30.

[0235] In some embodiments, the expression cassette comprises a regulatory element (e.g., an enhancer) comprising 10× repeat of HNF4_FOXA_v1 with poly-C/poly-G minimization v1. In certain embodiment, the regulatory element comprising the 10× repeat of HNF4_FOXA_v1 with poly-C/poly-G minimization v1 comprises SEQ ID NO: 31.

[0236] In some embodiments, the expression cassette comprises a regulatory element (e.g., an enhancer) comprising 10× repeat of HNF4_FOXA_v1 with poly-C/poly-G minimization and CpG minimization v1. In certain embodiment, the regulatory element comprising the 10× repeat of HNF4_FOXA_v1 with poly-C/poly-G minimization and CpG minimization v1 comprises SEQ ID NO: 32.

[0237] In some embodiments, the expression cassette comprises a regulatory element (e.g., an enhancer) comprising 10×repeat of HNF4_FOXA_v1 with poly-C/poly-G minimization v2. In certain embodiment, the regulatory element comprising the 10× repeat of HNF4_FOXA_v1 with poly-C/poly-G minimization v2 comprises SEQ ID NO: 33.

[0238] In some embodiments, the expression cassette comprises a regulatory element (e.g., an enhancer) comprising 10× repeat of HNF4_FOXA_v1 with poly-C/poly-G minimization and CpG minimization v2. In certain embodiment, the regulatory element comprising the 10× repeat of HNF4_FOXA_v1 with poly-C/poly-G minimization and CpG minimization v2 comprises SEQ ID NO: 34.

[0239] In some embodiments, the expression cassette comprises a regulatory element (e.g., an enhancer) comprising 10× repeat of HNF4_FOXA_v1 with poly-C/poly-G minimization v3. In certain embodiment, the regulatory element comprising the 10× repeat of HNF4_FOXA_v1 with poly-C/poly-G minimization v3 comprises SEQ ID NO: 35.

[0240] In some embodiments, the expression cassette comprises a regulatory element (e.g., an enhancer) comprising 10× repeat of HNF4_FOXA_v1 with poly-C/poly-G minimization and CpG minimization v3. In certain embodiment, the regulatory element comprising the 10× repeat of HNF4_FOXA_v1 with poly-C/poly-G minimization and CpG minimization v3 comprises SEQ ID NO: 36.

[0241] In some embodiments, the expression cassette comprises a regulatory element (e.g., an enhancer) comprising 10× repeat of the human SERPINA1 enhancer. In certain embodiment, the regulatory element comprising the 10× repeat of the human SERPINA1 enhancer comprises SEQ ID NO: 37.

[0242] In some embodiments, the expression cassette comprises a regulatory element (e.g., an enhancer) comprising 10× repeat of the Bushbaby SERPINA1 enhancer with adenenine nucleotide spacer. In certain embodiment, the regulatory element comprising the 10× repeat of the Bushbaby SERPINA1 enhancer with adenenine nucleotide spacer comprises SEQ ID NO: 38.

[0243] In some embodiments, the expression cassette comprises a regulatory element (e.g., an enhancer) comprising Bushbaby SERPINA1 enhancer, FOXA_HNF4_v1 enhancer, HNF4 consensus binding site enhancer. In certain embodiment, the regulatory element comprising the Bushbaby SERPINA1 enhancer, FOXA_HNF4_v1 enhancer, HNF4 consensus binding site enhancer comprises SEQ ID NO: 39.

[0244] In some embodiments, the expression cassette comprises a regulatory element (e.g., an enhancer) comprising HNF4 consensus binding site enhancer, Bushbaby SERPINA1 enhancer, FOXA_HNF4_v1 enhancer. In certain embodiment, the regulatory element comprising the HNF4 consensus binding site enhancer, Bushbaby SERPINA1 enhancer, FOXA_HNF4_v1 enhancer comprises SEQ ID NO: 40.

[0245] In some embodiments, the expression cassette comprises a regulatory element (e.g., an enhancer) comprising 3× repeat of hSerpEnh with 2mer spacers v1. In certain embodiment, the regulatory element comprising the 3× repeat of hSerpEnh with 2mer spacers v1 comprises SEQ ID NO: 41.

[0246] In some embodiments, the expression cassette comprises a regulatory element (e.g., an enhancer) comprising 3× repeat of hSerpEnh with 2mer spacers v2. In certain embodiment, the regulatory element comprising the 3× repeat of hSerpEnh with 2mer spacers v2 comprises SEQ ID NO: 42.

[0247] In some embodiments, the expression cassette comprises a regulatory element (e.g., an enhancer) comprising 3× repeat of hSerpEnh with 2mer spacers v3. In certain embodiment, the regulatory element comprising the 3× repeat of hSerpEnh with 2mer spacers v3 comprises SEQ ID NO: 43.

[0248] In some embodiments, the expression cassette comprises a regulatory element (e.g., an enhancer) comprising 3× repeat of hSerpEnh with 2mer spacers v4. In certain embodiment, the regulatory element comprising the 3× repeat of hSerpEnh with 2mer spacers v4 comprises SEQ ID NO: 44.

[0249] In some embodiments, the expression cassette comprises a regulatory element (e.g., an enhancer) comprising 3× repeat of hSerpEnh with 2mer spacers v5. In certain embodiment, the regulatory element comprising the 3× repeat of hSerpEnh with 2mer spacers v5 comprises SEQ ID NO: 45.

[0250] In some embodiments, the expression cassette comprises a regulatory element (e.g., an enhancer) comprising 3× repeat of hSerpEnh with 2mer spacers v6. In certain embodiment, the regulatory element comprising the 3× repeat of hSerpEnh with 2mer spacers v6 comprises SEQ ID NO: 46.

[0251] In some embodiments, the expression cassette comprises a regulatory element (e.g., an enhancer) comprising 3× repeat of hSerpEnh with 2mer spacers v7. In certain embodiment, the regulatory element comprising the 3× repeat of hSerpEnh with 2mer spacers v7 comprises SEQ ID NO: 47.

[0252] In some embodiments, the expression cassette comprises a regulatory element (e.g., an enhancer) comprising 3× repeat of hSerpEnh with 2mer spacers v8. In certain embodiment, the regulatory element comprising the 3× repeat of hSerpEnh with 2mer spacers v8 comprises SEQ ID NO: 48.

[0253] In some embodiments, the expression cassette comprises a regulatory element (e.g., an enhancer) comprising 3× repeat of hSerpEnh with 2mer spacers v9. In certain embodiment, the regulatory element comprising the 3× repeat of hSerpEnh with 2mer spacers v9 comprises SEQ ID NO: 49.

[0254] In some embodiments, the expression cassette comprises a regulatory element (e.g., an enhancer) comprising 3× repeat of hSerpEnh with 2mer spacers v10. In certain embodiment, the regulatory element comprising the 3× repeat of hSerpEnh with 2mer spacers v10 comprises SEQ ID NO: 50.

[0255] In some embodiments, the expression cassette comprises a regulatory element (e.g., an enhancer) comprising 3× repeat of hSerpEnh with 2mer spacers v11. In certain embodiment, the regulatory element comprising the 3× repeat of hSerpEnh with 2mer spacers v11comprises SEQ ID NO: 51.

[0256] In some embodiments, the expression cassette comprises a regulatory element (e.g., an enhancer) comprising 3× repeat of hSerpEnh with 2mer spacers v12. In certain embodiment, the regulatory element comprising the 3× repeat of hSerpEnh with 2mer spacers v12 comprises SEQ ID NO: 52.

[0257] In some embodiments, the expression cassette comprises a regulatory element (e.g., an enhancer) comprising 3× repeat of hSerpEnh with 2mer spacers v13. In certain embodiment, the regulatory element comprising the 3× repeat of hSerpEnh with 2mer spacers v13 comprises SEQ ID NO: 53.

[0258] In some embodiments, the expression cassette comprises a regulatory element (e.g., an enhancer) comprising 3× repeat of hSerpEnh with 2mer spacers v14. In certain embodiment, the regulatory element comprising the 3× repeat of hSerpEnh with 2mer spacers v14 comprises SEQ ID NO: 54.

[0259] In some embodiments, the expression cassette comprises a regulatory element (e.g., an enhancer) comprising 3× repeat of hSerpEnh with 2mer spacers v15. In certain embodiment, the regulatory element comprising the 3× repeat of hSerpEnh with 2mer spacers v15 comprises SEQ ID NO: 55.

[0260] In some embodiments, the expression cassette comprises a regulatory element (e.g., an enhancer) comprising 3× repeat of hSerpEnh with 2mer spacers v16. In certain embodiment, the regulatory element comprising the 3× repeat of hSerpEnh with 2mer spacers v16 comprises SEQ ID NO: 56.

[0261] In some embodiments, the expression cassette comprises a regulatory element (e.g., an enhancer) comprising 3× repeat of hSerpEnh with 2mer spacers v17. In certain embodiment, the regulatory element comprising the 3× repeat of hSerpEnh with 2mer spacers v17 comprises SEQ ID NO: 57.

[0262] In some embodiments, the expression cassette comprises a regulatory element (e.g., an enhancer) comprising 3× repeat of hSerpEnh with 2mer spacers v18. In certain embodiment, the regulatory element comprising the 3× repeat of hSerpEnh with 2mer spacers v18 comprises SEQ ID NO: 58.

[0263] In some embodiments, the expression cassette comprises a regulatory element (e.g., an enhancer) comprising 3× repeat of hSerpEnh with 2mer spacers v19. In certain embodiment, the regulatory element comprising the 3× repeat of hSerpEnh with 2mer spacers v19 comprises SEQ ID NO: 59.

[0264] In some embodiments, the expression cassette comprises a regulatory element (e.g., an enhancer) comprising 3× repeat of hSerpEnh with 2mer spacers v20. In certain embodiment, the regulatory element comprising the 3× repeat of hSerpEnh with 2mer spacers v20 comprises SEQ ID NO: 60.

[0265] In some embodiments, the expression cassette comprises a regulatory element (e.g., an enhancer) comprising 3× repeat of hSerpEnh with 3mer spacers v1. In certain embodiment, the regulatory element comprising the 3× repeat of hSerpEnh with 3mer spacers v1 comprises SEQ ID NO: 61.

[0266] In some embodiments, the expression cassette comprises a regulatory element (e.g., an enhancer) comprising 3× repeat of hSerpEnh with 3mer spacers v2. In certain embodiment, the regulatory element comprising the 3× repeat of hSerpEnh with 3mer spacers v2 comprises SEQ ID NO: 62.

[0267] In some embodiments, the expression cassette comprises a regulatory element (e.g., an enhancer) comprising 3× repeat of hSerpEnh with 3mer spacers v3. In certain embodiment, the regulatory element comprising the 3× repeat of hSerpEnh with 3mer spacers v3 comprises SEQ ID NO: 63.

[0268] In some embodiments, the expression cassette comprises a regulatory element (e.g., an enhancer) comprising 3× repeat of hSerpEnh with 5mer spacers v1. In certain embodiment, the regulatory element comprising the 3× repeat of hSerpEnh with 5mer spacers v1 comprises SEQ ID NO: 64.

[0269] In some embodiments, the expression cassette comprises a regulatory element (e.g., an enhancer) comprising 3× repeat of hSerpEnh with 5mer spacers v2. In certain embodiment, the regulatory element comprising the 3× repeat of hSerpEnh with 5mer spacers v2 comprises SEQ ID NO: 65.

[0270] In some embodiments, the expression cassette comprises a regulatory element (e.g., an enhancer) comprising 3× repeat of hSerpEnh with 5mer spacers v3. In certain embodiment, the regulatory element comprising the 3× repeat of hSerpEnh with 5mer spacers v3 comprises SEQ ID NO: 66.

[0271] In some embodiments, the expression cassette comprises a regulatory element (e.g., an enhancer) comprising 3× repeat of hSerpEnh with 11 mer spacers v1. In certain embodiment, the regulatory element comprising the 3× repeat of hSerpEnh with 11mer spacers v1 comprises SEQ ID NO: 67.

[0272] In some embodiments, the expression cassette comprises a regulatory element (e.g., an enhancer) comprising 3× repeat of hSerpEnh with 11 mer spacers v2. In certain embodiment, the regulatory element comprising the 3× repeat of hSerpEnh with 11mer spacers v2 comprises SEQ ID NO: 68.

[0273] In some embodiments, the expression cassette comprises a regulatory element (e.g., an enhancer) comprising 3× repeat of hSerpEnh with 11 mer spacers v3. In certain embodiment, the regulatory element comprising the 3× repeat of hSerpEnh with 11 mer spacers v3 comprises SEQ ID NO: 69.

[0274] In some embodiments, the expression cassette comprises a regulatory element (e.g., an enhancer) comprising 3× repeat of hSerpEnh with 11 mer spacers with HNF4 binding site in orientation 1 & FOXA binding site in orientation 1. In certain embodiment, the regulatory element comprising the 3× repeat of hSerpEnh with 11 mer spacers with HNF4 binding site in orientation 1 & FOXA binding site in orientation 1 comprises SEQ ID NO: 70.

[0275] In some embodiments, the expression cassette comprises a regulatory element (e.g., an enhancer) comprising 3× repeat of hSerpEnh with 11 mer spacers with HNF4 binding site in orientation 1 & FOXA binding site in orientation 2. In certain embodiment, the regulatory element comprising the 3× repeat of hSerpEnh with 11 mer spacers with HNF4 binding site in orientation 1 & FOXA binding site in orientation 2 comprises SEQ ID NO: 71.

[0276] In some embodiments, the expression cassette comprises a regulatory element (e.g., an enhancer) comprising 3× repeat of hSerpEnh with 11 mer spacers with HNF4 binding site in orientation 2 & FOXA binding site in orientation 1. In certain embodiment, the regulatory element comprising the 3× repeat of hSerpEnh with 11 mer spacers with HNF4 binding site in orientation 2 & FOXA binding site in orientation 1 comprises SEQ ID NO: 72.

[0277] In some embodiments, the expression cassette comprises a regulatory element (e.g., an enhancer) comprising 3× repeat of hSerpEnh with 11 mer spacers with HNF4 binding site in orientation 2 & FOXA binding site in orientation 2. In certain embodiment, the regulatory element comprising the 3× repeat of hSerpEnh with 11 mer spacers with HNF4 binding site in orientation 2 & FOXA binding site in orientation 2 comprises SEQ ID NO: 73.

[0278] In some embodiments, the expression cassette comprises a regulatory element (e.g., an enhancer) comprising 3× repeat of hSerpEnh with 30mer spacers v1. In certain embodiment, the regulatory element comprising the 3× repeat of hSerpEnh with 30mer spacers v1 comprises SEQ ID NO: 74.

[0279] In some embodiments, the expression cassette comprises a regulatory element (e.g., an enhancer) comprising 3× repeat of hSerpEnh with 30mer spacers v2. In certain embodiment, the regulatory element comprising the 3× repeat of hSerpEnh with 30mer spacers v2 comprises SEQ ID NO: 75.

[0280] In some embodiments, the expression cassette comprises a regulatory element (e.g., an enhancer) comprising 3× repeat of hSerpEnh with 30mer spacers v3. In certain embodiment, the regulatory element comprising the 3× repeat of hSerpEnh with 30mer spacers v3 comprises SEQ ID NO: 76.

[0281] In some embodiments, the expression cassette comprises a regulatory element (e.g., an enhancer) comprising 3× repeat of hSerpEnh with 30mer spacers with HNF4 binding site in orientation 1 & FOXA binding site in orientation 1. In certain embodiment, the regulatory element comprising the 3× repeat of hSerpEnh with 30mer spacers with HNF4 binding site in orientation 1 & FOXA binding site in orientation 1 comprises SEQ ID NO: 77.

[0282] In some embodiments, the expression cassette comprises a regulatory element (e.g., an enhancer) comprising 3× repeat of hSerpEnh with 30mer spacers with HNF4 binding site in orientation 1 & FOXA binding site in orientation 2. In certain embodiment, the regulatory element comprising the 3× repeat of hSerpEnh with 30mer spacers with HNF4 binding site in orientation 1 & FOXA binding site in orientation 2 comprises SEQ ID NO: 78.

[0283] In some embodiments, the expression cassette comprises a regulatory element (e.g., an enhancer) comprising 3× repeat of hSerpEnh with 30mer spacers with HNF4 binding site in orientation 2 & FOXA binding site in orientation 1. In certain embodiment, the regulatory element comprising the 3× repeat of hSerpEnh with 30mer spacers with HNF4 binding site in orientation 2 & FOXA binding site in orientation 1 comprises SEQ ID NO: 79.

[0284] In some embodiments, the expression cassette comprises a regulatory element (e.g., an enhancer) comprising 3× repeat of hSerpEnh with 30mer spacers with HNF4 binding site in orientation 2 & FOXA binding site in orientation 2. In certain embodiment, the regulatory element comprising the 3× repeat of hSerpEnh with 30mer spacers with HNF4 binding site in orientation 2 & FOXA binding site in orientation 2 comprises SEQ ID NO: 80.

[0285] In some embodiments, the expression cassette comprises a regulatory element (e.g., an enhancer) comprising 3 repeats of SERPINA1 enhancer derived from tibetan antelope, separated by T. In certain embodiment, the regulatory element comprising the 3× repeat of Tibetan antelope SERPINA1 comprises SEQ ID NO:138.

[0286] In some embodiments, the expression cassette comprises a regulatory element (e.g., an enhancer) comprising 3 repeats of SERPINA1 enhancer derived from armadillo with minimum CpG and separated by T. In certain embodiment, the regulatory element comprising the 3× repeat of Tibetan antelope SERPINA1 comprises SEQ ID NO:139.

[0287] In one embodiment, the disclosure provides an expression cassette comprising any one of SEQ ID NO: 1, SEQ ID NO: 2, SEQ ID NO: 3, SEQ ID NO: 4, SEQ ID NO: 5, SEQ ID NO: 6, SEQ ID NO: 7, SEQ ID NO: 8, SEQ ID NO: 9, SEQ ID NO: 10, SEQ ID NO: 11, SEQ ID NO: 12, SEQ ID NO: 13, SEQ ID NO: 14, SEQ ID NO: 15, SEQ ID NO: 16, SEQ ID NO: 17, SEQ ID NO: 18, SEQ ID NO: 19, SEQ ID NO: 20, SEQ ID NO: 21, SEQ ID NO: 22, SEQ ID NO: 23, SEQ ID NO: 24, SEQ ID NO: 25, SEQ ID NO: 26, SEQ ID NO: 27, SEQ ID NO: 28, SEQ ID NO: 29, SEQ ID NO: 30, SEQ ID NO: 31, SEQ ID NO: 32, SEQ ID NO: 33, SEQ ID NO: 34, SEQ ID NO: 35, SEQ ID NO: 36, SEQ ID NO: 37, SEQ ID NO: 38, SEQ ID NO: 39, SEQ ID NO: 40, SEQ ID NO: 41, SEQ ID NO: 42, SEQ ID NO: 43, SEQ ID NO: 44, SEQ ID NO: 45, SEQ ID NO: 46, SEQ ID NO: 47, SEQ ID NO: 48, SEQ ID NO: 49, SEQ ID NO: 50, SEQ ID NO: 51, SEQ ID NO: 52, SEQ ID NO: 53, SEQ ID NO: 54, SEQ ID NO: 55, SEQ ID NO: 56, SEQ ID NO: 57, SEQ ID NO: 58, SEQ ID NO: 59, SEQ ID NO: 60, SEQ ID NO: 61, SEQ ID NO: 62, SEQ ID NO: 63, SEQ ID NO: 64, SEQ ID NO: 65, SEQ ID NO: 66, SEQ ID NO: 67, SEQ ID NO: 68, SEQ ID NO: 69, SEQ ID NO: 70, SEQ ID NO: 71, SEQ ID NO: 72, SEQ ID NO: 73, SEQ ID NO: 74, SEQ ID NO: 75, SEQ ID NO: 76, SEQ ID NO: 77, SEQ ID NO: 78, SEQ ID NO: 79, SEQ ID NO: 80, SEQ ID NO: 138, or SEQ ID NO: 139.

[0288] In one embodiment, the expression cassette comprises a nucleic acid sequence that is at least 85%, 90%, 95%, 96%, 97%, 98%, or 99% identical to any one of SEQ ID NO: 1, SEQ ID NO: 2, SEQ ID NO: 3, SEQ ID NO: 4, SEQ ID NO: 5, SEQ ID NO: 6, SEQ ID NO: 7, SEQ ID NO: 8, SEQ ID NO: 9, SEQ ID NO: 10, SEQ ID NO: 11, SEQ ID NO: 12, SEQ ID NO: 13, SEQ ID NO: 14, SEQ ID NO: 15, SEQ ID NO: 16, SEQ ID NO: 17, SEQ ID NO: 18, SEQ ID NO: 19, SEQ ID NO: 20, SEQ ID NO: 21, SEQ ID NO: 22, SEQ ID NO: 23, SEQ ID NO: 24, SEQ ID NO: 25, SEQ ID NO: 26, SEQ ID NO: 27, SEQ ID NO: 28, SEQ ID NO: 29, SEQ ID NO: 30, SEQ ID NO: 31, SEQ ID NO: 32, SEQ ID NO: 33, SEQ ID NO: 34, SEQ ID NO: 35, SEQ ID NO: 36, SEQ ID NO: 37, SEQ ID NO: 38, SEQ ID NO: 39, SEQ ID NO: 40, SEQ ID NO: 41, SEQ ID NO: 42, SEQ ID NO: 43, SEQ ID NO: 44, SEQ ID NO: 45, SEQ ID NO: 46, SEQ ID NO: 47, SEQ ID NO: 48, SEQ ID NO: 49, SEQ ID NO: 50, SEQ ID NO: 51, SEQ ID NO: 52, SEQ ID NO: 53, SEQ ID NO: 54, SEQ ID NO: 55, SEQ ID NO: 56, SEQ ID NO: 57, SEQ ID NO: 58, SEQ ID NO: 59, SEQ ID NO: 60, SEQ ID NO: 61, SEQ ID NO: 62, SEQ ID NO: 63, SEQ ID NO: 64, SEQ ID NO: 65, SEQ ID NO: 66, SEQ ID NO: 67, SEQ ID NO: 68, SEQ ID NO: 69, SEQ ID NO: 70, SEQ ID NO: 71, SEQ ID NO: 72, SEQ ID NO: 73, SEQ ID NO: 74, SEQ ID NO: 75, SEQ ID NO: 76, SEQ ID NO: 77, SEQ ID NO: 78, SEQ ID NO: 79, SEQ ID NO: 80, SEQ ID NO: 138, or SEQ ID NO: 139.

[0289] In one embodiment, the disclosure provides an expression cassette consisting of SEQ ID NO: 1, SEQ ID NO: 2, SEQ ID NO: 3, SEQ ID NO: 4, SEQ ID NO: 5, SEQ ID NO: 6, SEQ ID NO: 7, SEQ ID NO: 8, SEQ ID NO: 9, SEQ ID NO: 10, SEQ ID NO: 11, SEQ ID NO: 12, SEQ ID NO: 13, SEQ ID NO: 14, SEQ ID NO: 15, SEQ ID NO: 16, SEQ ID NO: 17, SEQ ID NO: 18, SEQ ID NO: 19, SEQ ID NO: 20, SEQ ID NO: 21, SEQ ID NO: 22, SEQ ID NO: 23, SEQ ID NO: 24, SEQ ID NO: 25, SEQ ID NO: 26, SEQ ID NO: 27, SEQ ID NO: 28, SEQ ID NO: 29, SEQ ID NO: 30, SEQ ID NO: 31, SEQ ID NO: 32, SEQ ID NO: 33, SEQ ID NO: 34, SEQ ID NO: 35, SEQ ID NO: 36, SEQ ID NO: 37, SEQ ID NO: 38, SEQ ID NO: 39, SEQ ID NO: 40, SEQ ID NO: 41, SEQ ID NO: 42, SEQ ID NO: 43, SEQ ID NO: 44, SEQ ID NO: 45, SEQ ID NO: 46, SEQ ID NO: 47, SEQ ID NO: 48, SEQ ID NO: 49, SEQ ID NO: 50, SEQ ID NO: 51, SEQ ID NO: 52, SEQ ID NO: 53, SEQ ID NO: 54, SEQ ID NO: 55, SEQ ID NO: 56, SEQ ID NO: 57, SEQ ID NO: 58, SEQ ID NO: 59, SEQ ID NO: 60, SEQ ID NO: 61, SEQ ID NO: 62, SEQ ID NO: 63, SEQ ID NO: 64, SEQ ID NO: 65, SEQ ID NO: 66, SEQ ID NO: 67, SEQ ID NO: 68, SEQ ID NO: 69, SEQ ID NO: 70, SEQ ID NO: 71, SEQ ID NO: 72, SEQ ID NO: 73, SEQ ID NO: 74, SEQ ID NO: 75, SEQ ID NO: 76, SEQ ID NO: 77, SEQ ID NO: 78, SEQ ID NO: 79, SEQ ID NO: 80, SEQ ID NO: 138, or SEQ ID NO: 139.

[0290] The disclosed expression cassettes can be used in any situation where liver-specific transcription is desired. In various embodiments, any of the expression cassettes, including one or more of the enhancers, the spacers, the promoters, of the disclosure can be included in a viral vector (e.g., an AAV vector) or a non-viral vector (e.g., a ceDNA vector) for gene therapy methods in which liver-specific expression of a transgene is desired, such as liver-specific expression of a clotting factor (e.g., as described herein).

III. Viral vectors

[0291] In one embodiment, the disclosure relates to recombinant viral vectors comprising a nucleic acid sequence of a liver-specific promoter as described herein, in operative combination with a heterologous nucleic acid sequence encoding a therapeutic protein.

[0292] In one embodiment, the vector comprises a viral nucleic acid sequence of greater than 10, 20, 30, 40, 50, 100, or 200 nucleotides. In certain embodiments, the sequence of a viral nucleic acid comprises a human adeno-associated virus (hAAV) of serotypes 1, 2, 3B, 4, 5, 6, 7, 8, 9, or combinations or variants thereof, which it generally comprises an inverted terminal repeat of AAV.

[0293] In one embodiment, the disclosure provides a viral particle, e.g., a viral capsid comprising a vector as disclosed herein, e.g., wherein the vector is packaged in a capsid. The capsid can be a recombinant or chimeric capsid or particle, for example a capsid that has amino acid sequences that are a combination of AAV pseudotypes for VP 1, VP2 or VP3. An AAV capsid VP can be derived from a human AAVgene or animal AAV gene, or combinations with genetically modified alterations, i.e., AAV isolated from infected human cells or a non-human primate. Animal AAVs include those derived from birds, cattle, pigs, mice, etc. In one embodiment, the capsid may have amino acid sequences that are genetically modified or synthetic capsids identified by methods such as directed evolution or rational design.

[0294] In one embodiment, the vector is incompetent for replication within a human host, for example, the vector does not encode a viral polymerase.

[0295] In one embodiment, the liver-specific expression cassette comprises a sequence having at least 50, 60, 70, 75, 80, 85, 90, 91, 92, 93, 94, 95, 96, 97, 98, 99 or 100% sequence identity with any one of SEQ ID NOs: 1-80, 138 or 139 as set forth above.

Expression of a Protein from an AAV Vector

[0296] In one embodiment, the nucleic acid sequences and promoters of the disclosure are useful in the production of AAV vectors. AAV belongs to the Parvoviridae family and the Dependovirus genus. AAV is a small, enveloped virus that packages a single-stranded, linear DNA genome. Both the sense and antisense AAV DNA strands are packaged in AAV capsids with the same frequency.

[0297] The AAV genome is characterized by two inverted terminal repeats (ITRs) flanking two open reading frames (ORFs). In the AAV2 genome, for example, the first 125 nucleotides of the ITR are a palindrome, which folds back on itself to maximize base pairing and forms a T-shaped hairpin structure. The other 20 bases of the ITR, called sequence D, they remain unpaired. ITRs are cis-acting sequences important for AAV DNA replication; ITR is the origin of replication and serves as a primer for the synthesis of the second chain by DNA polymerase. The double-stranded DNA formed during this synthesis, which is called the replicating monomer, is used for a second round of self-priming replication and forms a replicating dimer. These double-stranded intermediates are processed using a chain-shifting mechanism, resulting in single-stranded DNA that is used for packaging and double-stranded DNA that is used for transcription. Located within the ITR are the Rep binding elements and a terminal resolution site (TRS). These characteristics are used by the viral regulatory protein Rep during AAV replication to process double-stranded intermediates. In addition to its role in AAV replication, ITR is also essential for AAV genome packaging, transcription, down-regulation under non-permissive conditions, and site-specific integration (Daya and Berns, Clin Microbiol Rev 21 (4): 583-593, 2008).

[0298] The AAV's left ORF contains the Rep gene, which encodes four proteins: Rep78, Rep 68, Rep52, and Rep40. The right ORF contains the Cap gene, which produces three viral capsid proteins (VP1, VP2, and VP3). The AAV capsid contains 60 viral capsid proteins arranged in icosahedral symmetry. VP1, VP2 and VP3 are present in a 1: 1: 10 molar ratio (Daya and Berns, Clin Microbiol Rev 21 (4): 583-593, 2008).

[0299] AAV vectors generally contain a transgene expression cassette between ITRs that replaces the rep and cap genes. Vector particles are produced by cotransfecting cells with a plasmid containing the vector genome and a packaging/helper construct that expresses the rep and cap proteins in trans. During infection, the genomes of AAV vectors enter the cell nucleus and can persist in multiple molecular states. A common result is the conversion of the AAV genome to a double-stranded circular episome by synthesis of the second strand or pairing with the complementary strand.

[0300] In the context of AAV vectors, the disclosed vectors generally have a recombinant genome that It comprises the following structure:

### (5′ITR of AAV)-(promoter)-(transgene)-(3′ITR of AAV)

[0301] As discussed above, these recombinant AAV vectors contain a transgene expression cassette between the ITRs that replaces the rep and cap genes. Vector particles are produced, for example, by cotransfecting cells with a plasmid containing the recombinant vector genome and a packaging/helper construct that expresses the rep and cap proteins in trans.

[0302] The AAV ITRs, and other selected AAV components described herein, can be readily selected from any AAV serotype, including, without limitation, AAV1, AAV2, AAV3, AAV4, AAV5, AAV6, AAV7, AAV8, AAV9 and function variants thereof. These ITRs or other AAV components can be easily isolated using techniques available to those skilled in the art from an AAV serotype. Said AAV can be isolated or obtained from academic, commercial or public sources (for example, the American Type Culture Collection, Manassas, Va.). Alternatively, AAV sequences can be obtained through synthetic means or other suitable means by reference to published sequences such as those available in the literature or in databases such as, for example, GenBank, PubMed or the like.

[0303] In one embodiment, the nucleic acids of the disclosure are part of an expression cassette or transgene. See for example, US Patent Application Publication 20150139953. The expression cassette is comprised of a transgene and regulatory sequences, eg, for example a promoter and 5′ and 3′ AVV inverted terminal repeats (ITRs). In a desirable embodiment, ITRs of AAV serotype 2 or 8 are used. However, ITRs can be selected from other suitable serotypes. An expression cassette is generally packaged in a capsid protein and delivered to a selected host cell.

[0304] In one embodiment, the disclosure provides a method of generating a recombinant adeno-associated virus (AAV) having an AAV serotype capsid, or a portion thereof. Such a method involves culturing a host cell that contains a nucleic acid sequence encoding an adeno-associated virus (AAV) serotype capsid protein; a functional rep gene; an expression cassette consisting of AAV inverted terminal repeats (ITRs) and a transgene; and enough ancillary functions to allow for packaging of the expression cassette into the AAV capsid protein. See for example, U.S. Patent Application Publication 20150139953.

[0305] Components for culture in the host cell to package an AAV expression cassette into an AAV capsid can be provided to the host cell in trans. Alternatively, one or more of the components (e.g., expression cassette, rep sequences, cap sequences, and/or helper functions) can be provided by a stable host cell that has been engineered to contain one or more of the components.

[0306] In one embodiment, the disclosure relates to recombinant vectors comprising a liver-specific promoter nucleic acid sequence of the disclosure in operative combination with the transgene. The transgene is a nucleic acid sequence, heterologous to the vector sequences that flank the transgene, that encodes a protein, e.g., a therapeutic protein, or other product of interest. The nucleic acid coding sequence is operably linked to regulatory components in a manner that allows transcription, translation and/or transgene expression in a host cell.

[0307] A typical transgene is a sequence that encodes a product that is useful in biology and medicine, such as proteins, peptides, RNA, enzymes, dominant negative mutants, or catalytic RNA. Desirable RNA molecules include mRNA, tRNA, dsRNA, ribosomal RNA, catalytic RNA, siRNA, guide RNA (gRNA), microRNA, small hairpin RNA, trans-splice RNA, and antisense RNA. An example of a useful RNA sequence is a sequence that inhibits or extinguishes the expression of a targeted nucleic acid sequence in the treated animal.

[0308] The transgene can be used to correct or improve genetic deficiencies, which may include deficiencies in which normal genes are expressed at lower than normal levels or deficiencies in which the functional gene product is not expressed. A preferred type of transgenic sequence encodes a therapeutic protein or polypeptide that is expressed in a host cell. The disclosure further contemplates the use of multiple transgenes, for example, to correct or improve a genetic defect caused by a multi-subunit protein. In certain situations, a different transgene can be used to encode each subunit of a protein, or to encode different peptides or proteins. This is desirable when the size of the DNA encoding the protein subunit is large, for example, for an immunoglobulin, platelet-derived growth factor, or a dystrophin protein. In order for the cell to produce the multi-subunit protein, a cell is infected with the recombinant virus that contains each of the different subunits. Alternatively, different subunits of a protein may be encoded by the same transgene.

[0309] The expression cassette can be carried in any suitable viral vector which is supplied to a host cell. The plasmids useful in the present disclosure can be engineered to be suitable for replication and, optionally, integration in prokaryotic cells, mammalian cells, or both. These plasmids (or other vectors carrying the AAV 5′ ITR-heterologous molecule-3′ ITR) contain sequences that allow replication of the expression cassette in eukaryotes and/or prokaryotes and selection markers for these systems. Preferably, the molecule that carries the expression cassette is transfected into the cell, where it may exist transiently. Alternatively, the expression cassette (carrying the 5′ITR of AAV-heterologous molecule-3′ ITR) can be stably integrated into the genome of the host cell, either chromosomally or as an episome. In certain embodiments, the expression cassette may be present in multiple copies, optionally in head-to-head, head-to-tail, or tail-to-tail concatamers. Suitable transfection techniques are known and can be easily used to deliver the expression cassette to the host cell.

[0310] In general, when the vector comprising the expression cassette is delivered by transfection, the vector and the relative amounts of vector DNA can be adjusted to the host cells, taking into account factors such as the selected vector, the delivery method and selected host cells. In addition to the expression cassette, the host cell contains the sequences that drive the expression of the AAV capsid protein in the host cell and the rep sequences of the same serotype as the AAV ITR serotype found in the expression cassette, or a cross-complement serotype. Although the molecules that provide rep and cap may exist in the host cell transiently (i.e., through transfection), it is preferred that one or both of the rep and cap proteins and the promoter (s) that control their expression they are stably expressed in the host cell, for example, as an episome or by integration into the chromosome of the host cell.

[0311] The packaging host cell generally also contains helper functions for packaging the rAAV of the disclosure. Optionally, these functions can be supplied by a herpesvirus. More desirably, the necessary auxiliary functions are each provided from a source of human or non-human primate adenoviruses, such as those described above and/or available from a variety of sources, including the American Type Culture Collection (ATCC), Manassas, Va. (USA). The desired auxiliary functions can be provided using any means that allows their expression in a cell.

[0312] Introduction into the vector host cell can be accomplished by any means known in the art or as disclosed above, including transfection, infection, electroporation, liposome delivery, membrane fusion techniques, high-speed DNA coated microgranules, infection viral or protoplast fusion, among others. One or more of the adenoviral genes can be stably integrated into the genome of the host cell, stably expressed as episomes, or transiently expressed. All gene products can be expressed transiently, at an episome, or stably integrated, or some of the gene products can be stably expressed while others are transiently expressed. Furthermore, promoters for each of the adenoviral genes can be independently selected from a constitutive promoter, an inducible promoter, or a natural adenoviral promoter. Promoters may be regulated by a specific physiological state of the organism or the cell (i.e., by the state of differentiation or in replicating or quiescent cells) or by exogenously added factors, for example.

[0313] The introduction of the molecules (such as plasmids or viruses) into the host cell can be accomplished using techniques known to the person skilled in the art. In a preferred embodiment, conventional transfection techniques, eg, transfection or electroporation with CaPO4, and/or infection by adenovirus/AAV hybrid vectors are used in cell lines such as the HEK 293 human embryonic kidney cell line (a cell line human kidney containing functional adenovirus E1 genes that provide trans-acting E1 proteins).

[0314] One of skill in the art will readily understand that AAV techniques can be adapted for use in these and other viral vector systems for gene delivery in vitro, ex vivo, or in vivo. In certain embodiments, the disclosure contemplates the use of nucleic acids and vectors disclosed herein in a variety of rAAV and non-rAAV vector systems. Such vector systems can include, for example, lentiviruses, retroviruses, poxviruses, vaccinia viruses, and adenoviral systems, among others.

[0315] In certain embodiments, the protein is a fVIII or fIX or a variant thereof as described herein. In certain embodiments, the codon and promoter optimization schemes disclosed herein could be used for any gene therapy with AAV targeting the liver. Other metabolic diseases caused by liver enzyme deficiencies and the expression of these functional proteins are contemplated.

[0316] In certain embodiments the nucleic acid sequence encoding a therapeutic protein comprises codons that are used or differentially represented in highly expressed genes within the liver or other specific tissue compared to the use of codons from the entire coding region of the human genome and avoid codons that are underrepresented in the liver or other specific tissue.

### IV. Non-Viral Vectors

[0317] In one embodiment, the expression cassettes described herein are useful in the production of non-vectors.

[0318] In one embodiment, the expression cassettes described herein are useful in the production of ceDNA vectors. In one embodiment, the disclosure provides the expression and/or production of a therapeutic protein (e.g., a liver-specific protein, e.g., a FVIII protein) in a cell, e.g., a liver cell, from a non-viral DNA vector, e.g., a ceDNA vector as described herein. In particular, ceDNA vectors for expression of a therapeutic protein (e.g., a FVIII protein) comprise a pair of ITRs (e.g., symmetric or asymmetric as described herein) and between the ITR pair, a nucleic acid encoding a therapeutic protein (e.g., a FVIII protein) operatively linked to a promoter or regulatory sequence. A distinct advantage of ceDNA vectors for expression of a therapeutic protein (e.g., a FVIII protein) over traditional AAV vectors, and even lentiviral vectors, is that there is no size constraint for the nucleic acid sequences, e.g., heterologous nucleic acid sequences, encoding a desired protein. Even a full length 6.8 kb FVIII protein can be expressed from a single ceDNA vector. Thus, ceDNA vectors described herein can be used to express a therapeutic FVIII protein in a subject in need thereof, e.g., a subject with hemophilia A.

[0319] In general, a ceDNA vector for expression of a therapeutic protein as disclosed herein, comprises in the 5′ to 3′ direction: a first adeno-associated virus (AAV) inverted terminal repeat (ITR), a nucleic acid sequence of interest (for example an expression cassette as described herein) and a second AAV ITR. The ITR sequences selected from any of: (i) at least one WT ITR and at least one modified AAV inverted terminal repeat (mod-ITR) (e.g., asymmetric modified ITRs); (ii) two modified ITRs where the mod-ITR pair have a different three-dimensional spatial organization with respect to each other (e.g., asymmetric modified ITRs), or (iii) symmetrical or substantially symmetrical WT-WT ITR pair, where each WT-ITR has the same three-dimensional spatial organization, or (iv) symmetrical or substantially symmetrical modified ITR pair, where each mod-ITR has the same three-dimensional spatial organization.

[0320] As one will appreciate, the ceDNA vector technologies can be adapted to any level of complexity or can be used in a modular fashion, where expression of different components of a therapeutic protein (e.g., a FVIII protein) can be controlled in an independent manner. For example, it is specifically contemplated that the ceDNA vector technologies described here can be as simple as using a single ceDNA vector to express a single gene sequence a therapeutic protein (e.g., a FVIII protein) or can be as complex as using multiple ceDNA vectors, where each vector expresses multiple FVIII therapeutic proteins or associated co-factors or accessory proteins that are each independently controlled by different promoters. The following embodiments are specifically contemplated and can adapted by one of skill in the art as desired.

[0321] In one embodiment, a single ceDNA vector can be used to express a single component of a ntherapeutic protein (e.g., a FVIII protein). Alternatively, a single ceDNA vector can be used to express multiple components (e.g., at least 2) of a therapeutic protein (e.g., a FVIII protein) under the control of a single promoter (e.g., a strong promoter), optionally using an IRES sequence(s) to ensure appropriate expression of each of the components, e.g., co-factors or accessory proteins.

[0322] As one of skill in the art will appreciate, it is often desirable to express components of a therapeutic protein (e.g., a FVIII protein) at different expression levels, thus controlling the stoichiometry of the individual components expressed to ensure efficient protein folding and combination in the cell. Additional variations of ceDNA vector technologies can be envisioned by one of skill in the art or can be adapted from protein production methods using conventional vectors.

[0323] Certain methods for the production of a ceDNA vector for expression of a therapeutic protein (e.g., a FVIII protein) comprising an asymmetrical ITR pair or symmetrical ITR pair as defined herein is described in section IV of International application PCT/US18/49996 filed Sep. 7, 2018, which is incorporated herein in its entirety by reference. In some embodiments, a ceDNA vector for expression of a therapeutic protein (e.g., a FVIII protein) as disclosed herein can be produced using insect cells, as described herein. In alternative embodiments, a ceDNA vector for expression of a therapeutic protein (e.g., a FVIII protein) as disclosed herein can be produced synthetically and in some embodiments, in a cell-free method, as disclosed on International Application PCT/US19/14122, filed Jan. 18, 2019, which is incorporated herein in its entirety by reference.

[0324] As described herein, in one embodiment, a ceDNA vector for expression of a therapeutic protein (e.g., a FVIII protein) can be obtained, for example, by the process comprising the steps of: a) incubating a population of host cells (e.g., insect cells) harboring the polynucleotide expression construct template (e.g., a ceDNA-plasmid, a ceDNA-Bacmid, and/or a ceDNA-baculovirus), which is devoid of viral capsid coding sequences, in the presence of a Rep protein under conditions effective and for a time sufficient to induce production of the ceDNA vector within the host cells, and wherein the host cells do not comprise viral capsid coding sequences; and b) harvesting and isolating the ceDNA vector from the host cells. The presence of Rep protein induces replication of the vector polynucleotide with a modified ITR to produce the ceDNA vector in a host cell. However, no viral particles (e.g., AAV virions) are expressed. Thus, there is no size limitation such as that naturally imposed in AAV or other viral-based vectors.

[0325] The presence of the ceDNA vector isolated from the host cells can be confirmed by digesting DNA isolated from the host cell with a restriction enzyme having a single recognition site on the ceDNA vector and analyzing the digested DNA material on a non-denaturing gel to confirm the presence of characteristic bands of linear and continuous DNA as compared to linear and non-continuous DNA.

[0326] In yet another aspect, the disclosure provides for use of host cell lines that have stably integrated the DNA vector polynucleotide expression template (ceDNA template) into their own genome in production of the non-viral DNA vector, e.g., as described in Lee, L. et al. (2013) Plos One 8(8): e69879. Preferably, Rep is added to host cells at an MOI of about 3. When the host cell line is a mammalian cell line, e.g., HEK293 cells, the cell lines can have polynucleotide vector template stably integrated, and a second vector such as herpes virus can be used to introduce Rep protein into cells, allowing for the excision and amplification of ceDNA in the presence of Rep and helper virus.

[0327] In one embodiment, the host cells used to make the ceDNA vectors for expression of a therapeutic protein (e.g., a FVIII protein) as described herein are insect cells, and baculovirus is used to deliver both the polynucleotide that encodes Rep protein and the non-viral DNA vector polynucleotide expression construct template for ceDNA. In some embodiments, the host cell is engineered to express Rep protein.

[0328] The ceDNA vector is then harvested and isolated from the host cells. The time for harvesting and collecting ceDNA vectors described herein from the cells can be selected and optimized to achieve a high-yield production of the ceDNA vectors. For example, the harvest time can be selected in view of cell viability, cell morphology, cell growth, etc. In one embodiment, cells are grown under sufficient conditions and harvested a sufficient time after baculoviral infection to produce ceDNA vectors but before a majority of cells start to die because of the baculoviral toxicity. The DNA vectors can be isolated using plasmid purification kits such as Qiagen Endo-Free Plasmid kits. Other methods developed for plasmid isolation can be also adapted for DNA vectors. Generally, any nucleic acid purification methods can be adopted.

[0329] The DNA vectors can be purified by any means known to those of skill in the art for purification of DNA. In one embodiment, ceDNA vectors are purified as DNA molecules. In another embodiment, the ceDNA vectors are purified as exosomes or microparticles.

[0330] The presence of the ceDNA vector for expression of a therapeutic protein (e.g., a FVIII protein) can be confirmed by digesting the vector DNA isolated from the cells with a restriction enzyme having a single recognition site on the DNA vector and analyzing both digested and undigested DNA material using gel electrophoresis to confirm the presence of characteristic bands of linear and continuous DNA as compared to linear and non-continuous DNA.

ceDNA Plasmid

[0331] A ceDNA-plasmid is a plasmid used for later production of a ceDNA vector for expression of a therapeutic protein (e.g., a FVIII protein). In some embodiments, a ceDNA-plasmid can be constructed using known techniques to provide at least the following as operatively linked components in the direction of transcription: (1) a modified 5′ ITR sequence; (2) an expression cassette as described herein comprising any one of SEQ ID NOs: 1-80, 138 and 139 and comprising a therapeutic transgene; and (3) a modified 3′ ITR sequence, where the 3′ ITR sequence is symmetric relative to the 5′ ITR sequence. In some embodiments, the expression cassette flanked by the ITRs comprises a cloning site for introducing an exogenous sequence. The expression cassette replaces the rep and cap coding regions of the AAV genomes.

[0332] In one aspect, a ceDNA vector for expression of therapeutic protein (e.g., a FVIII protein) is obtained from a plasmid, referred to herein as a “ceDNA-plasmid” encoding in this order: a first adeno-associated virus (AAV) inverted terminal repeat (ITR), an expression cassette as described herein comprising any one of SEQ ID NsS: 1-80, 138 and 139 and comprising a therapeutic transgene, and a mutated or modified AAV ITR, wherein said ceDNA-plasmid is devoid of AAV capsid protein coding sequences. In alternative embodiments, the ceDNA-plasmid encodes in this order: a first (or 5′) modified or mutated AAV ITR, an expression cassette comprising a transgene, and a second (or 3′) modified AAV ITR, wherein said ceDNA-plasmid is devoid of AAV capsid protein coding sequences, and wherein the 5′ and 3′ ITRs are symmetric relative to each other. In alternative embodiments, the ceDNA-plasmid encodes in this order: a first (or 5′) modified or mutated AAV ITR, an expression cassette as described herein comprising any one of SEQ ID NOs: 1-80, 138 and 139 and comprising a therapeutic transgene, and a second (or 3′) mutated or modified AAV ITR, wherein said ceDNA-plasmid is devoid of AAV capsid protein coding sequences, and wherein the 5′ and 3′ modified ITRs are have the same modifications (i.e., they are inverse complement or symmetric relative to each other).

[0333] In a further embodiment, the ceDNA-plasmid system is devoid of viral capsid protein coding sequences (i.e., it is devoid of AAV capsid genes but also of capsid genes of other viruses). In addition, in a particular embodiment, the ceDNA-plasmid is also devoid of AAV Rep protein coding sequences. Accordingly, in a preferred embodiment, ceDNA-plasmid is devoid of functional AAV cap and AAV rep genes GG-3′ for AAV2) plus a variable palindromic sequence allowing for hairpin formation.

[0334] A ceDNA-plasmid of the present disclosure can be generated using natural nucleotide sequences of the genomes of any AAV serotypes well known in the art. In one embodiment, the ceDNA-plasmid backbone is derived from the AAV1, AAV2, AAV3, AAV4, AAV5, AAV 5, AAV7, AAV8, AAV9, AAV10, AAV 11, AAV12, AAVrh8, AAVrh10, AAV-DJ, and AAV-DJ8 genome. e.g., NCBI: NC 002077; NC 001401; NC001729; NC001829; NC006152; NC 006260; NC 006261; Kotin and Smith, The Springer Index of Viruses, available at the URL maintained by Springer. In a particular embodiment, the ceDNA-plasmid backbone is derived from the AAV2 genome. In another particular embodiment, the ceDNA-plasmid backbone is a synthetic backbone genetically engineered to include at its 5′ and 3′ ITRs derived from one of these AAV genomes.

[0335] A ceDNA-plasmid can optionally include a selectable or selection marker for use in the establishment of a ceDNA vector-producing cell line. In one embodiment, the selection marker can be inserted downstream (i.e., 3′) of the 3′ ITR sequence. In another embodiment, the selection marker can be inserted upstream (i.e., 5′) of the 5′ ITR sequence. Appropriate selection markers include, for example, those that confer drug resistance. Selection markers can be, for example, a blasticidin S-resistance gene, kanamycin, geneticin, and the like. In a preferred embodiment, the drug selection marker is a blasticidin S-resistance gene.

[0336] An exemplary ceDNA (e.g., rAAVO) vector for expression of a therapeutic protein (e.g., a FVIII protein) is produced from an rAAV plasmid. A method for the production of a rAAV vector, can comprise: (a) providing a host cell with a rAAV plasmid as described above, wherein both the host cell and the plasmid are devoid of capsid protein encoding genes, (b) culturing the host cell under conditions allowing production of an ceDNA genome, and (c) harvesting the cells and isolating the AAV genome produced from said cells.

Exemplary Method of Making the ceDNA Vectors from ceDNA Plasmids

[0337] Methods for making capsid-less ceDNA vectors for expression of a therapeutic protein (e.g., a FVIII protein) are also provided herein, notably a method with a sufficiently high yield to provide sufficient vector for in vivo experiments.

[0338] In some embodiments, a method for the production of a ceDNA vector for expression of a therapeutic protein (e.g., a FVIII protein) comprises the steps of: (1) introducing the nucleic acid construct comprising an expression cassette and two symmetric ITR sequences into a host cell (e.g., Sf9 cells), (2) optionally, establishing a clonal cell line, for example, by using a selection marker present on the plasmid, (3) introducing a Rep coding gene (either by transfection or infection with a baculovirus carrying said gene) into said insect cell, and (4) harvesting the cell and purifying the ceDNA vector. The nucleic acid construct comprising an expression cassette and two ITR sequences described above for the production of ceDNA vector can be in the form of a ceDNA plasmid, or Bacmid or Baculovirus generated with the ceDNA plasmid as described below. The nucleic acid construct can be introduced into a host cell by transfection, viral transduction, stable integration, or other methods known in the art.

### Cell Lines

[0339] Host cell lines used in the production of a ceDNA vector for expression of a therapeutic protein (e.g., a FVIII protein) can include insect cell lines derived from Spodoptera frugiperda, such as Sf9 Sf21, or Trichoplusia ni cell, or other invertebrate, vertebrate, or other eukaryotic cell lines including mammalian cells. Other cell lines known to an ordinarily skilled artisan can also be used, such as HEK293, Huh-7, HeLa, HepG2, HeplA, 911, CHO, COS, MeWo, NIH3T3, A549, HT1 180, monocytes, and mature and immature dendritic cells. Host cell lines can be transfected for stable expression of the ceDNA-plasmid for high yield ceDNA vector production.

[0340] ceDNA-plasmids can be introduced into Sf9 cells by transient transfection using reagents (e.g., liposomal, calcium phosphate) or physical means (e.g., electroporation) known in the art. Alternatively, stable Sf9 cell lines which have stably integrated the ceDNA-plasmid into their genomes can be established. Such stable cell lines can be established by incorporating a selection marker into the ceDNA-plasmid as described above. If the ceDNA-plasmid used to transfect the cell line includes a selection marker, such as an antibiotic, cells that have been transfected with the ceDNA-plasmid and integrated the ceDNA-plasmid DNA into their genome can be selected for by addition of the antibiotic to the cell growth media. Resistant clones of the cells can then be isolated by single-cell dilution or colony transfer techniques and propagated.

Isolating and Purifying ceDNA vectors

[0341] ceDNA-vectors for expression of a therapeutic protein (e.g., a FVIII protein) disclosed herein can be obtained from a producer cell expressing AAV Rep protein(s), further transformed with a ceDNA-plasmid, ceDNA-bacmid, or ceDNA-baculovirus. Plasmids useful for the production of ceDNA vectors include plasmids that encode a therapeutic protein (e.g., a FVIII protein), or plasmids encoding one or more REP proteins.

[0342] In one aspect, a polynucleotide encodes the AAV Rep protein (Rep 78 or 68) delivered to a producer cell in a plasmid (Rep-plasmid), a bacmid (Rep-bacmid), or a baculovirus (Rep-baculovirus). The Rep-plasmid, Rep-bacmid, and Rep-baculovirus can be generated by methods described above.

[0343] Methods to produce a ceDNA vector for expression of a therapeutic protein (e.g., a FVIII protein) are described herein. Expression constructs used for generating a ceDNA vector for expression of a therapeutic protein (e.g., a FVIII protein) as described herein can be a plasmid (e.g., ceDNA-plasmids), a Bacmid (e.g., ceDNA-bacmid), and/or a baculovirus (e.g., ceDNA-baculovirus). By way of an example only, a ceDNA-vector can be generated from the cells co-infected with ceDNA-baculovirus and Rep-baculovirus. Rep proteins produced from the Rep-baculovirus can replicate the ceDNA-baculovirus to generate ceDNA-vectors. Alternatively, ceDNA vectors for expression of a therapeutic protein (e.g., a FVIII protein) can be generated from the cells stably transfected with a construct comprising a sequence encoding the AAV Rep protein (Rep78/52) delivered in Rep-plasmids, Rep-bacmids, or Rep-baculovirus. CeDNA-Baculovirus can be transiently transfected to the cells, be replicated by Rep protein and produce ceDNA vectors.

[0344] The bacmid (e.g., ceDNA-bacmid) can be transfected into permissive insect cells such as Sf9, Sf21, Tni (Trichoplusia ni) cell, High Five cell, and generate ceDNA-baculovirus, which is a recombinant baculovirus including the sequences comprising the symmetric ITRs and the expression cassette. ceDNA-baculovirus can be again infected into the insect cells to obtain a next generation of the recombinant baculovirus. Optionally, the step can be repeated once or multiple times to produce the recombinant baculovirus in a larger quantity.

[0345] The time for harvesting and collecting ceDNA vectors for expression of a therapeutic protein (e.g., a FVIII protein) as described herein from the cells can be selected and optimized to achieve a high-yield production of the ceDNA vectors. For example, the harvest time can be selected in view of cell viability, cell morphology, cell growth, etc. Usually, cells can be harvested after sufficient time after baculoviral infection to produce ceDNA vectors (e.g., ceDNA vectors) but before majority of cells start to die because of the viral toxicity. The ceDNA-vectors can be isolated from the Sf9 cells using plasmid purification kits such as Qiagen ENDO-FREE PLASMID® kits. Other methods developed for plasmid isolation can be also adapted for ceDNA vectors. Generally, any art-known nucleic acid purification methods can be adopted, as well as commercially available DNA extraction kits.

[0346] Alternatively, purification can be implemented by subjecting a cell pellet to an alkaline lysis process, centrifuging the resulting lysate and performing chromatographic separation. As one non-limiting example, the process can be performed by loading the supernatant on an ion exchange column (e.g., SARTOBIND Q®) which retains nucleic acids, and then eluting (e.g., with a 1.2 M NaCl solution) and performing a further chromatographic purification on a gel filtration column (e.g., 6 fast flow GE). The capsid-free AAV vector is then recovered by, e.g., precipitation.

[0347] In some embodiments, ceDNA vectors for expression of a therapeutic protein (e.g., a FVIII protein) can also be purified in the form of exosomes, or microparticles. It is known in the art that many cell types release not only soluble proteins, but also complex protein/nucleic acid cargoes via membrane microvesicle shedding (Cocucci et al, 2009; EP 10306226.1) Such vesicles include microvesicles (also referred to as microparticles) and exosomes (also referred to as nanovesicles), both of which comprise proteins and RNA as cargo. Microvesicles are generated from the direct budding of the plasma membrane, and exosomes are released into the extracellular environment upon fusion of multivesicular endosomes with the plasma membrane. Thus, ceDNA vector-containing microvesicles and/or exosomes can be isolated from cells that have been transduced with the ceDNA-plasmid or a bacmid or baculovirus generated with the ceDNA-plasmid.

[0348] Microvesicles can be isolated by subjecting culture medium to filtration or ultracentrifugation at 20,000×g, and exosomes at 100,000×g. The optimal duration of ultracentrifugation can be experimentally-determined and will depend on the particular cell type from which the vesicles are isolated. Preferably, the culture medium is first cleared by low-speed centrifugation (e.g., at 2000×g for 5-20 minutes) and subjected to spin concentration using, e.g., an AMICON® spin column (Millipore, Watford, UK). Microvesicles and exosomes can be further purified via FACS or MACS by using specific antibodies that recognize specific surface antigens present on the microvesicles and exosomes. Other microvesicle and exosome purification methods include, but are not limited to, immunoprecipitation, affinity chromatography, filtration, and magnetic beads coated with specific antibodies or aptamers. Upon purification, vesicles are washed with, e.g., phosphate-buffered saline. One advantage of using microvesicles or exosome to deliver ceDNA-containing vesicles is that these vesicles can be targeted to various cell types by including on their membrane proteins recognized by specific receptors on the respective cell types. (See also EP 10306226)

[0349] Another aspect of the disclosure herein relates to methods of purifying ceDNA vectors from host cell lines that have stably integrated a ceDNA construct into their own genome. In one embodiment, ceDNA vectors are purified as DNA molecules. In another embodiment, the ceDNA vectors are purified as exosomes or microparticles.

[0350] FIG. 5 of International application PCT/US18/49996 shows a gel confirming the production of ceDNA from multiple ceDNA-plasmid constructs using the method described in the Examples.

### V. Exemplary Recombinant Vectors

[0351] The nucleic acid sequences disclosed herein are useful in the production of expression plasmid, viral (AAV and rAAV) and non-viral vectors (ceDNA), and are also useful as antisense delivery vectors, gene therapy vectors, gene editing vectors (gRNA), or vaccine vectors.

[0352] In one embodiment, the disclosure provides a viral gene delivery vector comprising any one of SEQ ID NO: 1, SEQ ID NO: 2, SEQ ID NO: 3, SEQ ID NO: 4, SEQ ID NO: 5, SEQ ID NO: 6, SEQ ID NO: 7, SEQ ID NO: 8, SEQ ID NO: 9, SEQ ID NO: 10, SEQ ID NO: 11, SEQ ID NO: 12, SEQ ID NO: 13, SEQ ID NO: 14, SEQ ID NO: 15, SEQ ID NO: 16, SEQ ID NO: 17, SEQ ID NO: 18, SEQ ID NO: 19, SEQ ID NO: 20, SEQ ID NO: 21, SEQ ID NO: 22, SEQ ID NO: 23, SEQ ID NO: 24, SEQ ID NO: 25, SEQ ID NO: 26, SEQ ID NO: 27, SEQ ID NO: 28, SEQ ID NO: 29, SEQ ID NO: 30, SEQ ID NO: 31, SEQ ID NO: 32, SEQ ID NO: 33, SEQ ID NO: 34, SEQ ID NO: 35, SEQ ID NO: 36, SEQ ID NO: 37, SEQ ID NO: 38, SEQ ID NO: 39, SEQ ID NO: 40, SEQ ID NO: 41, SEQ ID NO: 42, SEQ ID NO: 43, SEQ ID NO: 44, SEQ ID NO: 45, SEQ ID NO: 46, SEQ ID NO: 47, SEQ ID NO: 48, SEQ ID NO: 49, SEQ ID NO: 50, SEQ ID NO: 51, SEQ ID NO: 52, SEQ ID NO: 53, SEQ ID NO: 54, SEQ ID NO: 55, SEQ ID NO: 56, SEQ ID NO: 57, SEQ ID NO: 58, SEQ ID NO: 59, SEQ ID NO: 60, SEQ ID NO: 61, SEQ ID NO: 62, SEQ ID NO: 63, SEQ ID NO: 64, SEQ ID NO: 65, SEQ ID NO: 66, SEQ ID NO: 67, SEQ ID NO: 68, SEQ ID NO: 69, SEQ ID NO: 70, SEQ ID NO: 71, SEQ ID NO: 72, SEQ ID NO: 73, SEQ ID NO: 74, SEQ ID NO: 75, SEQ ID NO: 76, SEQ ID NO: 77, SEQ ID NO: 78, SEQ ID NO: 79, SEQ ID NO: 80, SEQ ID NO: 138 or SEQ ID NO: 139 operably linked to a liver-specific promoter and a therapeutic transgene. In one embodiment, the disclosure provides a viral gene delivery vector comprising a nucleic acid sequence that is at least 85%, 90%, 95%, 96%, 97%, 98%, or 99% identical to any one of SEQ ID NO: 1, SEQ ID NO: 2, SEQ ID NO: 3, SEQ ID NO: 4, SEQ ID NO: 5, SEQ ID NO: 6, SEQ ID NO: 7, SEQ ID NO: 8, SEQ ID NO: 9, SEQ ID NO: 10, SEQ ID NO: 11, SEQ ID NO: 12, SEQ ID NO: 13, SEQ ID NO: 14, SEQ ID NO: 15, SEQ ID NO: 16, SEQ ID NO: 17, SEQ ID NO: 18, SEQ ID NO: 19, SEQ ID NO: 20, SEQ ID NO: 21, SEQ ID NO: 22, SEQ ID NO: 23, SEQ ID NO: 24, SEQ ID NO: 25, SEQ ID NO: 26, SEQ ID NO: 27, SEQ ID NO: 28, SEQ ID NO: 29, SEQ ID NO: 30, SEQ ID NO: 31, SEQ ID NO: 32, SEQ ID NO: 33, SEQ ID NO: 34, SEQ ID NO: 35, SEQ ID NO: 36, SEQ ID NO: 37, SEQ ID NO: 38, SEQ ID NO: 39, SEQ ID NO: 40, SEQ ID NO: 41, SEQ ID NO: 42, SEQ ID NO: 43, SEQ ID NO: 44, SEQ ID NO: 45, SEQ ID NO: 46, SEQ ID NO: 47, SEQ ID NO: 48, SEQ ID NO: 49, SEQ ID NO: 50, SEQ ID NO: 51, SEQ ID NO: 52, SEQ ID NO: 53, SEQ ID NO: 54, SEQ ID NO: 55, SEQ ID NO: 56, SEQ ID NO: 57, SEQ ID NO: 58, SEQ ID NO: 59, SEQ ID NO: 60, SEQ ID NO: 61, SEQ ID NO: 62, SEQ ID NO: 63, SEQ ID NO: 64, SEQ ID NO: 65, SEQ ID NO: 66, SEQ ID NO: 67, SEQ ID NO: 68, SEQ ID NO: 69, SEQ ID NO: 70, SEQ ID NO: 71, SEQ ID NO: 72, SEQ ID NO: 73, SEQ ID NO: 74, SEQ ID NO: 75, SEQ ID NO: 76, SEQ ID NO: 77, SEQ ID NO: 78, SEQ ID NO: 79, SEQ ID NO: 80, SEQ ID NO: 138, or SEQ ID NO: 139 operably linked to a liver-specific promoter and a therapeutic transgene. In one embodiment, the disclosure provides a viral gene delivery vector consisting of any one of SEQ ID NO: 1, SEQ ID NO: 2, SEQ ID NO: 3, SEQ ID NO: 4, SEQ ID NO: 5, SEQ ID NO: 6, SEQ ID NO: 7, SEQ ID NO: 8, SEQ ID NO: 9, SEQ ID NO: 10, SEQ ID NO: 11, SEQ ID NO: 12, SEQ ID NO: 13, SEQ ID NO: 14, SEQ ID NO: 15, SEQ ID NO: 16, SEQ ID NO: 17, SEQ ID NO: 18, SEQ ID NO: 19, SEQ ID NO: 20, SEQ ID NO: 21, SEQ ID NO: 22, SEQ ID NO: 23, SEQ ID NO: 24, SEQ ID NO: 25, SEQ ID NO: 26, SEQ ID NO: 27, SEQ ID NO: 28, SEQ ID NO: 29, SEQ ID NO: 30, SEQ ID NO: 31, SEQ ID NO: 32, SEQ ID NO: 33, SEQ ID NO: 34, SEQ ID NO: 35, SEQ ID NO: 36, SEQ ID NO: 37, SEQ ID NO: 38, SEQ ID NO: 39, SEQ ID NO: 40, SEQ ID NO: 41, SEQ ID NO: 42, SEQ ID NO: 43, SEQ ID NO: 44, SEQ ID NO: 45, SEQ ID NO: 46, SEQ ID NO: 47, SEQ ID NO: 48, SEQ ID NO: 49, SEQ ID NO: 50, SEQ ID NO: 51, SEQ ID NO: 52, SEQ ID NO: 53, SEQ ID NO: 54, SEQ ID NO: 55, SEQ ID NO: 56, SEQ ID NO: 57, SEQ ID NO: 58, SEQ ID NO: 59, SEQ ID NO: 60, SEQ ID NO: 61, SEQ ID NO: 62, SEQ ID NO: 63, SEQ ID NO: 64, SEQ ID NO: 65, SEQ ID NO: 66, SEQ ID NO: 67, SEQ ID NO: 68, SEQ ID NO: 69, SEQ ID NO: 70, SEQ ID NO: 71, SEQ ID NO: 72, SEQ ID NO: 73, SEQ ID NO: 74, SEQ ID NO: 75, SEQ ID NO: 76, SEQ ID NO: 77, SEQ ID NO: 78, SEQ ID NO: 79, SEQ ID NO: 80, SEQ ID NO: 138, or SEQ ID NO: 139 operably linked to a liver-specific promoter and a therapeutic transgene. In one embodiment, the disclosure provides a non-viral gene delivery vector comprising any one of SEQ ID NO: 1, SEQ ID NO: 2, SEQ ID NO: 3, SEQ ID NO: 4, SEQ ID NO: 5, SEQ ID NO: 6, SEQ ID NO: 7, SEQ ID NO: 8, SEQ ID NO: 9, SEQ ID NO: 10, SEQ ID NO: 11, SEQ ID NO: 12, SEQ ID NO: 13, SEQ ID NO: 14, SEQ ID NO: 15, SEQ ID NO: 16, SEQ ID NO: 17, SEQ ID NO: 18, SEQ ID NO: 19, SEQ ID NO: 20, SEQ ID NO: 21, SEQ ID NO: 22, SEQ ID NO: 23, SEQ ID NO: 24, SEQ ID NO: 25, SEQ ID NO: 26, SEQ ID NO: 27, SEQ ID NO: 28, SEQ ID NO: 29, SEQ ID NO: 30, SEQ ID NO: 31, SEQ ID NO: 32, SEQ ID NO: 33, SEQ ID NO: 34, SEQ ID NO: 35, SEQ ID NO: 36, SEQ ID NO: 37, SEQ ID NO: 38, SEQ ID NO: 39, SEQ ID NO: 40, SEQ ID NO: 41, SEQ ID NO: 42, SEQ ID NO: 43, SEQ ID NO: 44, SEQ ID NO: 45, SEQ ID NO: 46, SEQ ID NO: 47, SEQ ID NO: 48, SEQ ID NO: 49, SEQ ID NO: 50, SEQ ID NO: 51, SEQ ID NO: 52, SEQ ID NO: 53, SEQ ID NO: 54, SEQ ID NO: 55, SEQ ID NO: 56, SEQ ID NO: 57, SEQ ID NO: 58, SEQ ID NO: 59, SEQ ID NO: 60, SEQ ID NO: 61, SEQ ID NO: 62, SEQ ID NO: 63, SEQ ID NO: 64, SEQ ID NO: 65, SEQ ID NO: 66, SEQ ID NO: 67, SEQ ID NO: 68, SEQ ID NO: 69, SEQ ID NO: 70, SEQ ID NO: 71, SEQ ID NO: 72, SEQ ID NO: 73, SEQ ID NO: 74, SEQ ID NO: 75, SEQ ID NO: 76, SEQ ID NO: 77, SEQ ID NO: 78, SEQ ID NO: 79, SEQ ID NO: 80, SEQ ID NO: 138, or SEQ ID NO: 139 operably linked to a liver-specific promoter and a therapeutic transgene. In one embodiment, the disclosure provides a non-viral gene delivery vector comprising a nucleic acid sequence that is at least 85%, 90%, 95%, 96%, 97%, 98%, or 99% identical to any one of SEQ ID NO: 1, SEQ ID NO: 2, SEQ ID NO: 3, SEQ ID NO: 4, SEQ ID NO: 5, SEQ ID NO: 6, SEQ ID NO: 7, SEQ ID NO: 8, SEQ ID NO: 9, SEQ ID NO: 10, SEQ ID NO: 11, SEQ ID NO: 12, SEQ ID NO: 13, SEQ ID NO: 14, SEQ ID NO: 15, SEQ ID NO: 16, SEQ ID NO: 17, SEQ ID NO: 18, SEQ ID NO: 19, SEQ ID NO: 20, SEQ ID NO: 21, SEQ ID NO: 22, SEQ ID NO: 23, SEQ ID NO: 24, SEQ ID NO: 25, SEQ ID NO: 26, SEQ ID NO: 27, SEQ ID NO: 28, SEQ ID NO: 29, SEQ ID NO: 30, SEQ ID NO: 31, SEQ ID NO: 32, SEQ ID NO: 33, SEQ ID NO: 34, SEQ ID NO: 35, SEQ ID NO: 36, SEQ ID NO: 37, SEQ ID NO: 38, SEQ ID NO: 39, SEQ ID NO: 40, SEQ ID NO: 41, SEQ ID NO: 42, SEQ ID NO: 43, SEQ ID NO: 44, SEQ ID NO: 45, SEQ ID NO: 46, SEQ ID NO: 47, SEQ ID NO: 48, SEQ ID NO: 49, SEQ ID NO: 50, SEQ ID NO: 51, SEQ ID NO: 52, SEQ ID NO: 53, SEQ ID NO: 54, SEQ ID NO: 55, SEQ ID NO: 56, SEQ ID NO: 57, SEQ ID NO: 58, SEQ ID NO: 59, SEQ ID NO: 60, SEQ ID NO: 61, SEQ ID NO: 62, SEQ ID NO: 63, SEQ ID NO: 64, SEQ ID NO: 65, SEQ ID NO: 66, SEQ ID NO: 67, SEQ ID NO: 68, SEQ ID NO: 69, SEQ ID NO: 70, SEQ ID NO: 71, SEQ ID NO: 72, SEQ ID NO: 73, SEQ ID NO: 74, SEQ ID NO: 75, SEQ ID NO: 76, SEQ ID NO: 77, SEQ ID NO: 78, SEQ ID NO: 79, SEQ ID NO: 80, SEQ ID NO: 138, or SEQ ID NO: 139 operably linked to a liver-specific promoter and a therapeutic transgene. In one embodiment, the disclosure provides a non-viral gene delivery vector consisting of comprising any one of SEQ ID NO: 1, SEQ ID NO: 2, SEQ ID NO: 3, SEQ ID NO: 4, SEQ ID NO: 5, SEQ ID NO: 6, SEQ ID NO: 7, SEQ ID NO: 8, SEQ ID NO: 9, SEQ ID NO: 10, SEQ ID NO: 11, SEQ ID NO: 12, SEQ ID NO: 13, SEQ ID NO: 14, SEQ ID NO: 15, SEQ ID NO: 16, SEQ ID NO: 17, SEQ ID NO: 18, SEQ ID NO: 19, SEQ ID NO: 20, SEQ ID NO: 21, SEQ ID NO: 22, SEQ ID NO: 23, SEQ ID NO: 24, SEQ ID NO: 25, SEQ ID NO: 26, SEQ ID NO: 27, SEQ ID NO: 28, SEQ ID NO: 29, SEQ ID NO: 30, SEQ ID NO: 31, SEQ ID NO: 32, SEQ ID NO: 33, SEQ ID NO: 34, SEQ ID NO: 35, SEQ ID NO: 36, SEQ ID NO: 37, SEQ ID NO: 38, SEQ ID NO: 39, SEQ ID NO: 40, SEQ ID NO: 41, SEQ ID NO: 42, SEQ ID NO: 43, SEQ ID NO: 44, SEQ ID NO: 45, SEQ ID NO: 46, SEQ ID NO: 47, SEQ ID NO: 48, SEQ ID NO: 49, SEQ ID NO: 50, SEQ ID NO: 51, SEQ ID NO: 52, SEQ ID NO: 53, SEQ ID NO: 54, SEQ ID NO: 55, SEQ ID NO: 56, SEQ ID NO: 57, SEQ ID NO: 58, SEQ ID NO: 59, SEQ ID NO: 60, SEQ ID NO: 61, SEQ ID NO: 62, SEQ ID NO: 63, SEQ ID NO: 64, SEQ ID NO: 65, SEQ ID NO: 66, SEQ ID NO: 67, SEQ ID NO: 68, SEQ ID NO: 69, SEQ ID NO: 70, SEQ ID NO: 71, SEQ ID NO: 72, SEQ ID NO: 73, SEQ ID NO: 74, SEQ ID NO: 75, SEQ ID NO: 76, SEQ ID NO: 77, SEQ ID NO: 78, SEQ ID NO: 79, SEQ ID NO: 80, SEQ ID NO: 138, or SEQ ID NO: 139 operably linked to a liver-specific promoter and a therapeutic transgene.

[0353] In one embodiment, the nucleic acids of the disclosure can be part of any genetic element (vector) that can be supplied to a host cell, for example, naked DNA, a plasmid, phage, transposon, cosmid, episome, a protein in a non-viral delivery vehicle (e.g., a lipid-based transporter), viruses, etc. that transfer the sequences carried on them.

[0354] In one embodiment, a vector can be a lentivirus-based vector (containing genes or lentiviral sequences), for example, having nucleic acid sequences derived from VSVG or GP64 pseudotypes or both.

[0355] According to some aspects, the disclosure refers to virus particles, e.g., capsids, that contain the nucleic acid sequences encoding the expression cassettes and proteins disclosed herein. Viral particles, capsids, and recombinant vectors are useful in delivering a heterologous gene or other nucleic acid sequences to a target cell. Nucleic acids can be easily used in a variety of vector systems, capsids, and host cells. In one embodiment, the nucleic acids are in vectors contained within a capsid comprising terminal protection proteins, including AAV capsid proteins vp1, vp2, vp3 and hypervariable regions.

### Exemplary Therapeutic Protein (e.g., a FVIII Protein)

[0356] In particular, a ceDNA vector for expression of a therapeutic protein (e.g., a FVIII protein) as disclosed herein can encode, for example, but is not limited to a FVIII protein, as well as variants, and/or active fragments thereof, for use in the treatment, prophylaxis, and/or amelioration of one or more symptoms of hemophilia A. In one aspect, the hemophilia A is a human hemophilia A.

### FVIII Therapeutic Proteins and Fragments Thereof

[0357] Essentially any version of the FVIII therapeutic protein or fragment thereof (e.g., functional fragment) can be encoded by and expressed in and from a viral or non-viral vector as described herein. One of skill in the art will understand that FVIII therapeutic protein includes all splice variants and orthologs of the Therapeutic protein (e.g., a FVIII protein). FVIII therapeutic protein includes intact molecules as well as fragments (e.g., functional) thereof.

[0358] In one embodiment, the nucleic acid sequence encoding the protein comprises a higher percentage of liver cell specific amino acid codons compared to the general use of human codons. According to some aspects, the disclosure provides methods of treating a subject diagnosed with a genetic disease or disorder that results in the expression of a mutated or truncated non-functional protein by administering an effective amount of a vector disclosed herein (e.g., an AAV vector or a ceDNA vector) to express a functional liver protein.

### Factor VIII

[0359] Factor VIII is the nonenzymatic cofactor to the activated clotting factor IX (FIXa), which, when proteolytically activated, interacts with FIXa to form a tight noncovalent complex that binds to and activates factor X (FX).

[0360] The Factor VIII gene or protein can also be referred to as F8, Coagulation Factor VIII, Procoagulant Component, Antihemophilic Factor, F8C, AHF, DXS1253E, FVIII, HEMA, or F8B. Expression of the Factor VIII gene is tissue-specific and is mostly observed in liver cells. The highest level of the mRNA and Factor VIII proteins has been detected in liver sinusoidal cells; significant amounts of Factor VIII are also present in hepatocytes and in Kupffer cells (resident macrophages of liver sinusoids). Moderate levels of Factor VIII protein are detectable in the serum and plasma. Low to moderate levels of Factor VIII protein are expressed in fetal brain, retina, kidney and testis.

[0361] Factor VIII mRNA is expressed throughout many tissues of the body, including bone marrow, whole blood, white blood cells, lymph nodes, thymus, brain, cerebral cortex, cerebellum, retina, spinal cord, tibial nerve, heart, artery, smooth muscle, skeletal muscle, small intestine, colon, adipocytes, kidney, liver, lung, spleen, stomach, esophagus, bladder, pancreas, thyroid, salivary gland, adrenal gland, pituitary gland, breast, skin, ovary, uterus, placenta, prostate, and testis. The FVIII gene localized on the long arm of the X chromosome occupies a region approximately 186 kbp long and consists of 26 exons (69-3,106 bp) and introns (from 207 bp to 32.4 kbp). The total length of the coding sequence of this gene is 9 kbp.

[0362] The mature factor VIII polypeptide comprises the A1-A2-B-A3-C1-C2 structural domains. Three acidic subdomains, which are denoted as a1-a3-A1(a1)-A2(a2)-B-(a3)A3-C1-C2, localize at the boundaries of A domains and play a significant role in the interaction between FVIII and other proteins (in particular, with thrombin). Mutations in these subdomains reduce the level of factor VIII activation by thrombin.

[0363] The factor VIII protein (Coagulation factor VIII isoform) is a preproprotein [Homo sapiens]; Accession number: NP_000123.1 (2351 aa) and has the following sequence:

(SEQ ID NO: 142)
MQIELSTCFFLCLLRFCFSATRRYYLGAVELSWDYMQSDLGELPVDARFPPRVPKSFPFNTSVVYKKTL
FVEFTDHLENIAKPRPPWMGLLGPTIQAEVYDTVVITLKNMASHPVSLHAVGVSYWKASEGAEYDDQTS
QREKEDDKVFPGGSHTYVWQVLKENGPMASDPLCLTYSYLSHVDLVKDLNSGLIGALLVCREGSLAKEK
TQTLHKFILLFAVFDEGKSWHSETKNSLMQDRDAASARAWPKMHTVNGYVNRSLPGLIGCHRKSVYWHV
IGMGTTPEVHSIFLEGHTFLVRNHRQASLEISPITFLTAQTLLMDLGQFLLFCHISSHQHDGMEAYVKV
DSCPEEPQLRMKNNEEAEDYDDDLTDSEMDVVRFDDDNSPSFIQIRSVAKKHPKTWVHYIAAEEEDWDY
APLVLAPDDRSYKSQYLNNGPQRIGRKYKKVRFMAYTDETFKTREAIQHESGILGPLLYGEVGDTLLII
FKNQASRPYNIYPHGITDVRPLYSRRLPKGVKHLKDFPILPGEIFKYKWTVTVEDGPTKSDPRCLTRYY
SSFVNMERDLASGLIGPLLICYKESVDQRGNQIMSDKRNVILFSVFDENRSWYLTENIQRFLPNPAGVQ
LEDPEFQASNIMHSINGYVEDSLQLSVCLHEVAYWYILSIGAQTDFLSVFFSGYTFKHKMVYEDILTLF
PFSGETVFMSMENPGLWILGCHNSDERNRGMTALLKVSSCDKNIGDYYEDSYEDISAYLLSKNNAIEPR
SFSQNSRHPSTRQKQFNATTIPENDIEKTDPWFAHRTPMPKIQNVSSSDLLMLLRQSPTPHGLSLSDLQ
EAKYETFSDDPSPGAIDSNNSLSEMTHFRPQLHHSGDMVFTPESGLQLRLNEKLGTTAATELKKLDFKV
SSTSNNLISTIPSDNLAAGTDNTSSLGPPSMPVHYDSQLDTTLFGKKSSPLTESGGPLSLSEENNDSKL
LESGLMNSQESSWGKNVSSTESGRLFKGKRAHGPALLTKDNALFKVSISLLKINKTSNNSATNRKTHID
GPSLLIENSPSVWQNILESDTEFKKVTPLIHDRMLMDKNATALRLNHMSNKTTSSKNMEMVQQKKEGPI
PPDAQNPDMSFFKMLFLPESARWIQRTHGKNSLNSGQGPSPKQLVSLGPEKSVEGQNFLSEKNKVVVGK
GEFTKDVGLKEMVFPSSRNLFLINLDNLHENNTHNQEKKIQEEIEKKETLIQENVVLPQIHTVTGTKNF
MKNLFLLSTRQNVEGSYDGAYAPVLQDFRSLNDSTNRTKKHTAHFSKKGEEENLEGLGNQTKQIVEKYA
CTTRISPNTSQQNFVTQRSKRALKQFRLPLEETELEKRIIVDDTSTQWSKNMKHLTPSTLTQIDYNEKE
KGAITQSPLSDCLTRSHSIPQANRSPLPIAKVSSFPSIRPIYLTRVLFQDNSSHLPAASYRKKDSGVQE
SSHFLQGAKKNNLSLAILTLEMTGDQREVGSLGTSATNSVTYKKVENTVLPKPDLPKTSGKVELLPKVH
IYQKDLFPTETSNGSPGHLDLVEGSLLQGTEGAIKWNEANRPGKVPFLRVATESSAKTPSKLLDPLAWD
NHYGTQIPKEEWKSQEKSPEKTAFKKKDTILSLNACESNHAIAAINEGQNKPEIEVTWAKQGRTERLCS
QNPPVLKRHQREITRTTLQSDQEEIDYDDTISVEMKKEDEDIYDEDENQSPRSFQKKTRHYFIAAVERL
WDYGMSSSPHVLRNRAQSGSVPQFKKVVFQEFTDGSFTQPLYRGELNEHLGLLGPYIRAEVEDNIMVTF
RNQASRPYSFYSSLISYEEDQRQGAEPRKNFVKPNETKTYFWKVQHHMAPTKDEFDCKAWAYFSDVDLE
KDVHSGLIGPLLVCHTNTLNPAHGRQVTVQEFALFFTIFDETKSWYFTENMERNCRAPCNIQMEDPTFK
ENYRFHAINGYIMDTLPGLVMAQDQRIRWYLLSMGSNENIHSIHFSGHVFTVRKKEEYKMALYNLYPGV
FETVEMLPSKAGIWRVECLIGEHLHAGMSTLFLVYSNKCQTPLGMASGHIRDFQITASGQYGQWAPKLA
RLHYSGSINAWSTKEPFSWIKVDLLAPMIIHGIKTQGARQKFSSLYISQFIIMYSLDGKKWQTYRGNST
GTLMVFFGNVDSSGIKHNIFNPPIIARYIRLHPTHYSIRSTLRMELMGCDLNSCSMPLGMESKAISDAQ
ITASSYFTNMFATWSPSKARLHLQGRSNAWRPQVNNPKEWLQVDFQKTMKVTGVTTQGVKSLLTSMYVK
EFLISSSQDGHQWTLFFQNGKVKVFQGNQDSFTPVVNSLDPPLLTRYLRIHPQSWVHQIALRMEVLGCE
AQDLY

[0364] In one embodiment, FVIII therapeutic protein can be an “therapeutic protein variant,” which refers to the FVIII therapeutic protein having an altered amino acid sequence, composition or structure as compared to its corresponding native FVIII therapeutic protein. In one embodiment, FVIII is a functional version (e.g., wild type Therapeutic protein (e.g., a FVIII protein)). It may also be useful to express a mutant version of Therapeutic protein (e.g., a FVIII protein) such as a point mutation (F309 mutation) or deletion mutation (e.g., B domain deleted and/or single chain recombinant FVIII) as described in many examples herein. FVIII therapeutic protein expressed from the ceDNA vectors may further comprise a sequence/moiety that confers an additional functionality, such as fluorescence, enzyme activity, or secretion signal. In one embodiment, an FVIII therapeutic protein variant comprises a non-native tag sequence for identification (e.g., an immunotag) to allow it to be distinguished from endogenous FVIII therapeutic protein in a recipient host cell.

[0365] It is well within the abilities of one of skill in the art to take a known and/or publicly available protein sequence of e.g., FVIII therapeutic protein and reverse engineer a cDNA sequence to encode such a protein. The cDNA can then be codon optimized to match the intended host cell and inserted into a vector as described herein.

[0366] In one embodiment, the FVIII therapeutic protein encoding sequence can be derived from an existing host cell or cell line, for example, by reverse transcribing mRNA obtained from the host and amplifying the sequence using PCR.

### Vectors Expressing FVIII Proteins

[0367] A ceDNA vector having one or more sequences encoding a desired FVIII therapeutic protein can comprise regulatory sequences such as promoters, secretion signals, introns, polyA regions, and enhancers to maximize expression of the FVIII therapeutic protein when delivered to a desired cell or tissue. At a minimum, a ceDNA vector comprises one or more nucleic acid sequences encoding the FVIII therapeutic protein or functional fragment thereof.

[0368] In some embodiments, the ceDNA vector comprises a codon optimized FVIII sequence. In some embodiments, the ceDNA vector comprises a codon optimized FVIII sequence as shown in FIGS. 11 and 12 (hFVIII-F309S-BD226seq124-BDD-F309)In some embodiments, the ceDNA vector comprises an FVIII sequence comprising the nucleic acid sequence as set forth in SEQ ID NO: 143 as shown below: ceDNA 1651 ORF sequence (GE-715; hFVIII-F309S-BD226seq124-BDD-F309)

(SEQ ID NO: 143)
ATGCAGATTGAGCTGAGCACCTGCTTCTTCCTGTGCCTGCTGAGGTTCTGCTTCTCTGCCACCAGGAGA
TACTACCTGGGGGCTGTGGAGCTGAGCTGGGACTACATGCAGTCTGACCTGGGGGAGCTGCCTGTGGAT
GCCAGGTTCCCCCCCAGAGTGCCCAAGAGCTTCCCCTTCAACACCTCTGTGGTGTACAAGAAGACCCTG
TTTGTGGAGTTCACTGACCACCTGTTCAACATTGCCAAGCCCAGGCCCCCCTGGATGGGCCTGCTGGGC
CCCACCATCCAGGCTGAGGTGTATGACACTGTGGTGATCACCCTGAAGAACATGGCCAGCCACCCTGTG
AGCCTGCATGCTGTGGGGGTGAGCTACTGGAAGGCCTCTGAGGGGGCTGAGTATGATGACCAGACCAGC
CAGAGGGAGAAGGAGGATGACAAGGTGTTCCCTGGGGGCAGCCACACCTATGTGTGGCAGGTGCTGAAG
GAGAATGGCCCCATGGCCTCTGACCCCCTGTGCCTGACCTACAGCTACCTGAGCCATGTGGACCTGGTG
AAGGACCTGAACTCTGGCCTGATTGGGGCCCTGCTGGTGTGCAGGGAGGGCAGCCTGGCCAAGGAGAAG
ACCCAGACCCTGCACAAGTTCATCCTGCTGTTTGCTGTGTTTGATGAGGGCAAGAGCTGGCACTCTGAA
ACCAAGAACAGCCTGATGCAGGACAGGGATGCTGCCTCTGCCAGGGCCTGGCCCAAGATGCACACTGTG
AATGGCTATGTGAACAGGAGCCTGCCTGGCCTGATTGGCTGCCACAGGAAGTCTGTGTACTGGCATGTG
ATTGGCATGGGCACCACCCCTGAGGTGCACAGCATCTTCCTGGAGGGCCACACCTTCCTGGTCAGGAAC
CACAGGCAGGCCAGCCTGGAGATCAGCCCCATCACCTTCCTGACTGCCCAGACCCTGCTGATGGACCTG
GGCCAGTTCCTGCTGTTCTGCCACATCAGCAGCCACCAGCATGATGGCATGGAGGCCTATGTGAAGGTG
GACAGCTGCCCTGAGGAGCCCCAGCTGAGGATGAAGAACAATGAGGAGGCTGAGGACTATGATGATGAC
CTGACTGACTCTGAGATGGATGTGGTGAGGTTTGATGATGACAACAGCCCCAGCTTCATCCAGATCAGG
TCTGTGGCCAAGAAGCACCCCAAGACCTGGGTGCACTACATTGCTGCTGAGGAGGAGGACTGGGACTAT
GCCCCCCTGGTGCTGGCCCCTGATGACAGGAGCTACAAGAGCCAGTACCTGAACAATGGCCCCCAGAGG
ATTGGCAGGAAGTACAAGAAGGTCAGGTTCATGGCCTACACTGATGAAACCTTCAAGACCAGGGAGGCC
ATCCAGCATGAGTCTGGCATCCTGGGCCCCCTGCTGTATGGGGAGGTGGGGGACACCCTGCTGATCATC
TTCAAGAACCAGGCCAGCAGGCCCTACAACATCTACCCCCATGGCATCACTGATGTGAGGCCCCTGTAC
AGCAGGAGGCTGCCCAAGGGGGTGAAGCACCTGAAGGACTTCCCCATCCTGCCTGGGGAGATCTTCAAG
TACAAGTGGACTGTGACTGTGGAGGATGGCCCCACCAAGTCTGACCCCAGGTGCCTGACCAGATACTAC
AGCAGCTTTGTGAACATGGAGAGGGACCTGGCCTCTGGCCTGATTGGCCCCCTGCTGATCTGCTACAAG
GAGTCTGTGGACCAGAGGGGCAACCAGATCATGTCTGACAAGAGGAATGTGATCCTGTTCTCTGTGTTT
GATGAGAACAGGAGCTGGTACCTGACTGAGAACATCCAGAGGTTCCTGCCCAACCCTGCTGGGGTGCAG
CTGGAGGACCCTGAGTTCCAGGCCAGCAACATCATGCACAGCATCAATGGCTATGTGTTTGACAGCCTG
CAGCTGTCTGTGTGCCTGCATGAGGTGGCCTACTGGTACATCCTGAGCATTGGGGCCCAGACTGACTTC
CTGTCTGTGTTCTTCTCTGGCTACACCTTCAAGCACAAGATGGTGTATGAGGACACCCTGACCCTGTTC
CCCTTCTCTGGGGAGACTGTGTTCATGAGCATGGAGAACCCTGGCCTGTGGATTCTGGGCTGCCACAAC
TCTGACTTCAGGAACAGGGGCATGACTGCCCTGCTGAAAGTCTCCAGCTGTGACAAGAACACTGGGGAC
TACTATGAGGACAGCTATGAGGACATCTCTGCCTACCTGCTGAGCAAGAACAATGCCATTGAGCCCAGG
AGCTTCAGCCAGAATAGCAGGCACCCCAGCACCAGGCAGAAGCAGTTCAATGCCACCACCATCCCAGAG
AATACCACCCTGCAGTCTGACCAGGAGGAGATTGACTATGATGACACCATCTCTGTGGAGATGAAGAAG
GAGGACTTTGACATCTACGACGAGGACGAGAACCAGAGCCCCAGGAGCTTCCAGAAGAAGACCAGGCAC
TACTTCATTGCTGCTGTGGAGAGGCTGTGGGACTATGGCATGAGCAGCAGCCCCCATGTGCTGAGGAAC
AGGGCCCAGTCTGGCTCTGTGCCCCAGTTCAAGAAGGTGGTGTTCCAGGAGTTCACTGATGGCAGCTTC
ACCCAGCCCCTGTACAGAGGGGAGCTGAATGAGCACCTGGGCCTGCTGGGCCCCTACATCAGGGCTGAG
GTGGAGGACAACATCATGGTGACCTTCAGGAACCAGGCCAGCAGGCCCTACAGCTTCTACAGCAGCCTG
ATCAGCTATGAGGAGGACCAGAGGCAGGGGGCTGAGCCCAGGAAGAACTTTGTGAAGCCCAATGAAACC
AAGACCTACTTCTGGAAGGTGCAGCACCACATGGCCCCCACCAAGGATGAGTTTGACTGCAAGGCCTGG
GCCTACTTCTCTGATGTGGACCTGGAGAAGGATGTGCACTCTGGCCTGATTGGCCCCCTGCTGGTGTGC
CACACCAACACCCTGAACCCTGCCCATGGCAGGCAGGTGACTGTGCAGGAGTTTGCCCTGTTCTTCACC
ATCTTTGATGAAACCAAGAGCTGGTACTTCACTGAGAACATGGAGAGGAACTGCAGGGCCCCCTGCAAC
ATCCAGATGGAGGACCCCACCTTCAAGGAGAACTACAGGTTCCATGCCATCAATGGCTACATCATGGAC
ACCCTGCCTGGCCTGGTGATGGCCCAGGACCAGAGGATCAGGTGGTACCTGCTGAGCATGGGCAGCAAT
GAGAACATCCACAGCATCCACTTCTCTGGCCATGTGTTCACTGTGAGGAAGAAGGAGGAGTACAAGATG
GCCCTGTACAACCTGTACCCTGGGGTGTTTGAGACTGTGGAGATGCTGCCCAGCAAGGCTGGCATCTGG
AGGGTGGAGTGCCTGATTGGGGAGCACCTGCATGCTGGCATGAGCACCCTGTTCCTGGTGTACAGCAAC
AAGTGCCAGACCCCCCTGGGCATGGCCTCTGGCCACATCAGGGACTTCCAGATCACTGCCTCTGGCCAG
TATGGCCAGTGGGCCCCCAAGCTGGCCAGGCTGCACTACTCTGGCAGCATCAATGCCTGGAGCACCAAG
GAGCCCTTCAGCTGGATCAAGGTGGACCTGCTGGCCCCCATGATCATCCATGGCATCAAGACCCAGGGG
GCCAGGCAGAAGTTCAGCAGCCTGTACATCAGCCAGTTCATCATCATGTACAGCCTGGATGGCAAGAAG
TGGCAGACCTACAGGGGCAACAGCACTGGCACCCTGATGGTGTTCTTTGGCAATGTGGACAGCTCTGGC
ATCAAGCACAACATCTTCAACCCCCCCATCATTGCCAGATACATCAGGCTGCACCCCACCCACTACAGC
ATCAGGAGCACCCTGAGGATGGAGCTGATGGGCTGTGACCTGAACAGCTGCAGCATGCCCCTGGGCATG
GAGAGCAAGGCCATCTCTGATGCCCAGATCACTGCCAGCAGCTACTTCACCAACATGTTTGCCACCTGG
AGCCCCAGCAAGGCCAGGCTGCACCTGCAGGGCAGGAGCAATGCCTGGAGGCCCCAGGTCAACAACCCC
AAGGAGTGGCTGCAGGTGGACTTCCAGAAGACCATGAAGGTGACTGGGGTGACCACCCAGGGGGTGAAG
AGCCTGCTGACCAGCATGTATGTGAAGGAGTTCCTGATCAGCAGCAGCCAGGATGGCCACCAGTGGACC
CTGTTCTTCCAGAATGGCAAGGTGAAGGTGTTCCAGGGCAACCAGGACAGCTTCACCCCTGTGGTGAAC
AGCCTGGACCCCCCCCTGCTGACCAGATACCTGAGGATTCACCCCCAGAGCTGGGTGCACCAGATTGCC
CTGAGGATGGAGGTGCTGGGCTGTGAGGCCCAGGACCTGTACTGA

[0369] In some embodiments, the ceDNA vector comprises an FVIII sequence that is at least 85% identical to the nucleic acid sequence as set forth in SEQ ID NO: 143. In some embodiments, the ceDNA vector comprises an FVIII sequence that is at least 90% identical to the nucleic acid sequence as set forth in SEQ ID NO: 143. In some embodiments, the ceDNA vector comprises an FVIII sequence that is at least 95% identical to the nucleic acid sequence as set forth in SEQ ID NO: 143. In some embodiments, the ceDNA vector comprises an FVIII sequence that is at least 96% identical to the nucleic acid sequence as set forth in SEQ ID NO: 143. In some embodiments, the ceDNA vector comprises an FVIII sequence that is at least 97% identical to the nucleic acid sequence as set forth in SEQ ID NO: 143. In some embodiments, the ceDNA vector comprises an FVIII sequence that is at least 98% identical to the nucleic acid sequence as set forth in SEQ ID NO: 143. In some embodiments, the ceDNA vector comprises an FVIII sequence that is at least 99% identical to the nucleic acid sequence as set forth in SEQ ID NO: 143. In some embodiments, the ceDNA vector comprises an FVIII sequence that consists of SEQ ID NO: 143.

### FVIII Therapeutic Proteins and Uses Thereof for the Treatment of Hemophilia A

[0370] The viral and non-viral vectors comprising the expression cassettes described herein can be used to deliver a liver-specific therapeutic protein (e.g., a FVIII protein) for treatment of hemophilia A associated with inappropriate expression of the liver-specific therapeutic protein (e.g., a FVIII protein) and/or mutations within the liver-specific therapeutic protein (e.g., a FVIII protein).

[0371] The vectors as described herein can be used to express any desired FVIII therapeutic protein. Exemplary therapeutic FVIII therapeutic proteins include but are not limited to any therapeutic protein (e.g., a FVIII protein), or portion thereof, expressed by, e.g., a nucleic acid at least 85%, at least 90%, at least 95%, at least 96%, at least 97%, at least 98% or at least 99% identical to SEQ ID NO: 143.

[0372] In one embodiment, the expressed FVIII therapeutic protein is functional for the treatment of a hemophilia A. In some embodiments, FVIII therapeutic protein does not cause an immune system reaction.

[0373] In another embodiment, the vectors encoding FVIII therapeutic protein or fragment thereof (e.g., functional fragment) can be used to generate a chimeric protein. Thus, it is specifically contemplated herein that a vector expressing a chimeric protein can be administered to e.g., to any one or more tissues selected from: liver, kidneys, gallbladder, prostate, adrenal gland. In some embodiments, when a vector that has been engineered to express FVIII is administered to an infant, or administered to a subject in utero, one can administer the vector to any one or more tissues selected from: liver, adrenal gland, heart, intestine, lung, and stomach, or to a liver stem cell precursor thereof for the in vivo or ex vivo treatment of hemophilia A.

### Hemophilia

[0374] Hemophilia A is a genetic deficiency in clotting factor VIII, which causes increased bleeding and usually affects males. In the majority of cases, it is inherited as an X-linked recessive trait, though there are cases which arise from spontaneous mutations. In terms of the symptoms of hemophilia A, there are internal or external bleeding episodes. Individuals with more severe hemophilia suffer more severe and more frequent bleeding, while others with mild hemophilia typically suffer more minor symptoms except after surgery or serious trauma. Moderate hemophiliacs have variable symptoms which manifest along a spectrum between severe and mild forms.

[0375] Current treatments to prevent bleeding in people with hemophilia A involve Factor VIII medication. Most individuals with severe hemophilia require regular supplementation with intravenous recombinant or plasma concentrate Factor VIII. Recombinant blood clotting factor VIII is one of the most complex proteins for industrial manufacturing due to the low efficiency of its gene transcription, massive intracellular loss of its proprotein during post-translational processing, and the instability of the secreted protein. Mild hemophiliacs can manage their condition with desmopressin, a drug which releases stored factor VIII from blood vessel walls.

[0376] There are many complications related to treatment of hemophilia A. In children, an easily accessible intravenous port can be inserted to minimize frequent traumatic intravenous cannulation. However, these ports are associated with high infection rate and a risk of clots forming at the tip of the catheter, rendering it useless. Viral infections can be common in hemophiliacs due to frequent blood transfusions which put patients at risk of acquiring blood borne infections, such as HIV, hepatitis B and hepatitis C. Prion infections can also be transmitted by blood transfusions. Another therapeutic complication of hemophilia A is the development of inhibitor antibodies against factor VIII due to frequent infusions. These develop as the body recognizes the infused factor VIII as foreign, as the body does not produce its own copy. In these individuals, activated factor VII, a precursor to factor VIII in the coagulation cascade, can be infused as a treatment for hemorrhage in individuals with hemophilia and antibodies against replacement factor VIII.

### Coagulation Cascade

[0377] Coagulation, also known as clotting, is the process by which blood changes from a liquid to a gel, forming a blood clot. It potentially results in hemostasis, the cessation of blood loss from a damaged vessel, followed by repair. The mechanism of coagulation involves activation, adhesion and aggregation of platelets along with deposition and maturation of fibrin. Disorders of coagulation are disease states which can result in bleeding (hemorrhage or bruising) or obstructive clotting (thrombosis).

[0378] Coagulation begins almost instantly after an injury to the blood vessel has damaged the endothelium lining the blood vessel. Exposure of blood to the subendothelial space initiates two processes: changes in platelets, and the exposure of subendothelial tissue factor to plasma Factor VII, which ultimately leads to fibrin formation. Platelets immediately form a plug at the site of injury; this is called primary hemostasis. Secondary hemostasis occurs simultaneously: additional coagulation factors or clotting factors beyond Factor VII (including Factor VIII) respond in a complex cascade to form fibrin strands, which strengthen the platelet plug.

[0379] The coagulation cascade of secondary hemostasis has two initial pathways which lead to fibrin formation. These are the contact activation pathway (also known as the intrinsic pathway), and the tissue factor pathway (also known as the extrinsic pathway), which both lead to the same fundamental reactions that produce fibrin. The primary pathway for the initiation of blood coagulation is the tissue factor (extrinsic) pathway. The pathways are a series of reactions, in which a zymogen (inactive enzyme precursor) of a serine protease and its glycoprotein co-factor are activated to become active components that then catalyze the next reaction in the cascade, ultimately resulting in cross-linked fibrin. Coagulation factors are generally indicated by Roman numerals, with a lowercase a appended to indicate an active form.

[0380] The coagulation factors are generally serine proteases (enzymes), which act by cleaving downstream proteins. The exceptions are tissue factor, FV, FVIII, FXIII. Tissue factor, FV and FVIII are glycoproteins, and Factor XIII is a transglutaminase. The coagulation factors circulate as inactive zymogens. The coagulation cascade is therefore classically divided into three pathways. The tissue factor and contact activation pathways both activate the “final common pathway” of factor X, thrombin and fibrin.

[0381] The main role of the tissue factor (extrinsic) pathway is to generate a “thrombin burst”, a process by which thrombin, the most important constituent of the coagulation cascade in terms of its feedback activation roles, is released very rapidly. FVIIa circulates in a higher amount than any other activated coagulation factor. The process includes the following steps:

[0382] Step 1: Following damage to the blood vessel, FVII leaves the circulation and comes into contact with tissue factor (TF) expressed on tissue-factor-bearing cells (stromal fibroblasts and leukocytes), forming an activated complex (TF-FVIIa).

[0383] Step 2: TF-FVIIa activates FIX and FX.

[0384] Step 3: FVII is itself activated by thrombin, FXIa, FXII and FXa.

[0385] Step 4: The activation of FX (to form FXa) by TF-FVIIa is almost immediately inhibited by tissue factor pathway inhibitor (TFPI).

[0386] Step 5: FXa and its co-factor FVa form the prothrombinase complex, which activates prothrombin to thrombin.

[0387] Step 6: Thrombin then activates other components of the coagulation cascade, including FV and FVIII (which forms a complex with FIX), and activates and releases FVIII from being bound to von Willebrand factor (vWF).

[0388] Step 7: FVIIIa is the co-factor of FIXa, and together they form the “tenase” complex, which activates FX; and so the cycle continues.

[0389] The contact activation (intrinsic) pathway begins with formation of the primary complex on collagen by high-molecular-weight kininogen (HMWK), prekallikrein, and FXII (Hageman factor). Prekallikrein is converted to kallikrein and FXII becomes FXIIa. FXIIa converts FXI into FXIa. Factor XIa activates FIX, which with its co-factor FVIIIa form the tenase complex, which activates FX to FXa. The minor role that the contact activation pathway has in initiating clot formation can be illustrated by the fact that patients with severe deficiencies of FXII, HMWK, and prekallikrein do not have a bleeding disorder. Instead, contact activation system is more involved in inflammation, and innate immunity.

[0390] The final common pathway shared by the intrinsic and extrinsic coagulation pathways involves the conversion of prothrombin into thrombin and fibrinogen into fibrin. Thrombin has a large array of functions, not only the conversion of fibrinogen to fibrin, the building block of a hemostatic plug. In addition, it is the most important platelet activator and on top of that it activates Factors VIII and V and their inhibitor protein C (in the presence of thrombomodulin), and it activates Factor XIII, which forms covalent bonds that crosslink the fibrin polymers that form from activated monomers.

[0391] Following activation by the contact factor or tissue factor pathways, the coagulation cascade is maintained in a prothrombotic state by the continued activation of FVIII and FIX to form the tenase complex, until it is down-regulated by the anticoagulant pathways.

[0392] In some embodiments, a vector for expression of a therapeutic protein (e.g., a FVIII protein) comprising an expression cassette as disclosed herein can also encode co-factors or other polypeptides, sense or antisense oligonucleotides, or RNAs (coding or non-coding; e.g., siRNAs, shRNAs, micro-RNAs, and their antisense counterparts (e.g., antagoMiR)) that can be used in conjunction with the Therapeutic protein (e.g., a FVIII protein) expressed from the ceDNA. Additionally, expression cassettes comprising sequence encoding an Therapeutic protein (e.g., a FVIII protein) can also include an exogenous sequence that encodes a reporter protein to be used for experimental or diagnostic purposes, such as β-lactamase, 3-galactosidase (LacZ), alkaline phosphatase, thymidine kinase, green fluorescent protein (GFP), chloramphenicol acetyltransferase (CAT), luciferase, and others well known in the art.

[0393] In one embodiment, the ceDNA vector comprises a nucleic acid sequence to express the therapeutic protein (e.g., a FVIII protein) that is functional for the treatment of hemophilia A. In a preferred embodiment, the therapeutic protein (e.g., a FVIII protein) does not cause an immune system reaction, unless so desired.

### VI. Pharmaceutical Compositions

[0394] In another aspect, pharmaceutical compositions are provided. The pharmaceutical composition comprises a ceDNA vector for expression of a therapeutic protein (e.g., a FVIII protein) as described herein and a pharmaceutically acceptable carrier or diluent.

[0395] The viral and nob-viral vectors for expression of a therapeutic protein (e.g., a FVIII protein) as disclosed herein can be incorporated into pharmaceutical compositions suitable for administration to a subject for in vivo delivery to cells, tissues, or organs of the subject. Typically, the pharmaceutical composition comprises a viral or non-viral vector (e.g., an AAV vector, a ceDNA vector) as disclosed herein and a pharmaceutically acceptable carrier. For example, the vectors for expression of a therapeutic protein (e.g., a FVIII protein) as described herein can be incorporated into a pharmaceutical composition suitable for a desired route of therapeutic administration (e.g., parenteral administration). Passive tissue transduction via high pressure intravenous or intra-arterial infusion, as well as intracellular injection, such as intranuclear microinjection or intracytoplasmic injection, are also contemplated.

[0396] In one embodiment, pharmaceutical compositions for therapeutic purposes can be formulated as a solution, microemulsion, dispersion, liposomes, or other ordered structure suitable to high vector concentration, in particular, high ceDNA vector concentration. Sterile injectable solutions can be prepared by incorporating the vector compound in the required amount in an appropriate buffer with one or a combination of ingredients enumerated above, as required, followed by filtered sterilization including a vector can be formulated to deliver a transgene in the nucleic acid to the cells of a recipient, resulting in the therapeutic expression of the transgene or donor sequence therein. The composition can also include a pharmaceutically acceptable carrier.

[0397] Pharmaceutically active compositions comprising a vector (e.g., an AAV vector, a ceDNA vector) for expression of a therapeutic protein (e.g., a FVIII protein) can be formulated to deliver a transgene for various purposes to the cell, e.g., cells of a subject.

[0398] Pharmaceutical compositions for therapeutic purposes typically must be sterile and stable under the conditions of manufacture and storage. The composition can be formulated as a solution, microemulsion, dispersion, liposomes, or other ordered structure suitable to high vector, in particular, high ceDNA vectorconcentration. Sterile injectable solutions can be prepared by incorporating the ceDNA vector compound in the required amount in an appropriate buffer with one or a combination of ingredients enumerated above, as required, followed by filtered sterilization.

[0399] Ator for expression of therapeutic protein (e.g., a FVIII protein) as disclosed herein can be incorporated into a pharmaceutical composition suitable for topical, systemic, intra-amniotic, intrathecal, intracranial, intra-arterial, intravenous, intralymphatic, intraperitoneal, subcutaneous, tracheal, intra-tissue (e.g., intramuscular, intracardiac, intrahepatic, intrarenal, intracerebral), intrathecal, intravesical, conjunctival (e.g., extra-orbital, intraorbital, retroorbital, intraretinal, subretinal, choroidal, sub-choroidal, intrastromal, intracameral and intravitreal), intracochlear, and mucosal (e.g., oral, rectal, nasal) administration. Passive tissue transduction via high pressure intravenous or intraarterial infusion, as well as intracellular injection, such as intranuclear microinjection or intracytoplasmic injection, are also contemplated.

[0400] In some aspects, the methods provided herein comprise delivering one or more vectors for expression of therapeutic protein (e.g., a FVIII protein) as disclosed herein to a host cell. Also provided herein are cells produced by such methods, and organisms (such as animals, plants, or fungi) comprising or produced from such cells. Methods of delivery of nucleic acids can include lipofection, nucleofection, microinjection, biolistics, liposomes, immunoliposomes, polycation or lipid:nucleic acid conjugates, naked DNA, and agent-enhanced uptake of DNA. Lipofection is described in e.g., U.S. Pat. Nos. 5,049,386, 4,946,787; and 4,897,355, the contents of each of which are incorporated by reference in their entireties herein) and lipofection reagents are sold commercially (e.g., TRANSFECTAM™ and LIPFECTIN™). Delivery can be to cells (e.g., in vitro or ex vivo administration) or target tissues (e.g., in vivo administration).

[0401] Various techniques and methods are known in the art for delivering nucleic acids to cells. For example, nucleic acids, such as ceDNA for expression of therapeutic protein (e.g., a FVIII protein) can be formulated into lipid nanoparticles (LNPs), lipidoids, liposomes, lipid nanoparticles, lipoplexes, or core-shell nanoparticles. Typically, LNPs are composed of nucleic acid (e.g., ceDNA) molecules, one or more ionizable or cationic lipids (or salts thereof), one or more non-ionic or neutral lipids (e.g., a phospholipid), a molecule that prevents aggregation (e.g., PEG or a PEG-lipid conjugate), and optionally a sterol (e.g., cholesterol).

[0402] Another method for delivering nucleic acids, such as ceDNA for expression of therapeutic protein (e.g., a FVIII protein) to a cell is by conjugating the nucleic acid with a ligand that is internalized by the cell. For example, the ligand can bind a receptor on the cell surface and internalized via endocytosis. The ligand can be covalently linked to a nucleotide in the nucleic acid. Exemplary conjugates for delivering nucleic acids into a cell are described, example, in WO2015/006740, WO2014/025805, WO2012/037254, WO2009/082606, WO2009/073809, WO2009/018332, WO2006/112872, WO2004/090108, WO2004/091515 and WO2017/177326, the contents of each of which are incorporated by reference in their entireties herein.

[0403] Nucleic acids, such as ceDNA vectors for expression of therapeutic protein (e.g., a FVIII protein) can also be delivered to a cell by transfection. Useful transfection methods include, but are not limited to, lipid-mediated transfection, cationic polymer-mediated transfection, or calcium phosphate precipitation. Transfection reagents are well known in the art and include, but are not limited to, TurboFect Transfection Reagent (Thermo Fisher Scientific), Pro-Ject Reagent (Thermo Fisher Scientific), TRANSPASS™ P Protein Transfection Reagent (New England Biolabs), CHARIOT™ Protein Delivery Reagent (Active Motif), PROTEOJUICE™ Protein Transfection Reagent (EMD Millipore), 293fectin, LIPOFECTAMINE™ 2000, LIPOFECTAMINE™ 3000 (Thermo Fisher Scientific), LIPOFECTAMINE™ (Thermo Fisher Scientific), LIPOFECTIN™ (Thermo Fisher Scientific), DMRIE-C, CELLFECTIN™ (Thermo Fisher Scientific), OLIGOFECTAMINE™ (Thermo Fisher Scientific), LIPOFECTACE™, FUGENE™ (Roche, Basel, Switzerland), FUGENE™ HD (Roche), TRANSFECTAM™ (Transfectam, Promega, Madison, Wis.), TFX-10™ (Promega), TFX-20™ (Promega), TFX-50™ (Promega), TRANSFECTIN™ (BioRad, Hercules, Calif.), SILENTFECT™ (Bio-Rad), Effectene™ (Qiagen, Valencia, Calif.), DC-chol (Avanti Polar Lipids), GENEPORTER™ (Gene Therapy Systems, San Diego, Calif.), DHARMAFECT 1™ (Dharmacon, Lafayette, Colo.), DHARMAFECT 2™ (Dharmacon), DHARMAFECT 3™ (Dharmacon), DHARMAFECT 4™ (Dharmacon), ESCORT™ III (Sigma, St. Louis, Mo.), and ESCORT™ IV (Sigma Chemical Co.). Nucleic acids, such as ceDNA, can also be delivered to a cell via microfluidics methods known to those of skill in the art.

[0404] Vectors (e.g., AAV vectors or ceDNA vectors) for expression of therapeutic protein (e.g., a FVIII protein) as described herein can also be administered directly to an organism for transduction of cells in vivo. Administration is by any of the routes normally used for introducing a molecule into ultimate contact with blood or tissue cells including, but not limited to, injection, infusion, topical application and electroporation. Suitable methods of administering such nucleic acids are available and well known to those of skill in the art, and, although more than one route can be used to administer a particular composition, a particular route can often provide a more immediate and more effective reaction than another route.

[0405] Methods for introduction of a nucleic acid vector ceDNA vector for expression of therapeutic protein (e.g., a FVIII protein) as disclosed herein can be delivered into hematopoietic stem cells, for example, by the methods as described, for example, in U.S. Pat. No. 5,928,638, the contents of which is incorporated by reference in its entirety herein.

### VII. Methods of Use

[0406] A non-viral or viral vector for expression of a therapeutic protein (e.g., a FVIII protein) as disclosed herein can also be used in a method for the delivery of a nucleic acid sequence of interest (e.g., encoding a therapeutic protein (e.g., a FVIII protein)) to a target cell (e.g., a host cell). In some embodiments, the method comprises a method for delivering a therapeutic protein (e.g., a FVIII protein) to a cell of a subject in need thereof and treating hemophilia A. The disclosure allows for the in vivo expression of the therapeutic protein (e.g., a FVIII protein) encoded in the ceDNA vector in a cell in a subject such that therapeutic effect of the expression of the therapeutic protein (e.g., a FVIII protein) occurs. These results are seen with both in vivo and in vitro modes of vector delivery.

[0407] In some embodiments, the disclosure provides a method for the delivery of a therapeutic protein (e.g., a FVIII protein) in a cell of a subject in need thereof, comprising multiple administrations of the vector of the disclosure encoding said therapeutic protein (e.g., a FVIII protein). In some embodiments, the ceDNA vectors of the disclosure do not induce an immune response like that typically observed against encapsidated viral vectors, such that a multiple administration strategy will likely have greater success in a ceDNA-based system. The ceDNA vector are administered in sufficient amounts to transfect the cells of a desired tissue and to provide sufficient levels of gene transfer and expression of the therapeutic protein (e.g., a FVIII protein) without undue adverse effects.

[0408] The disclosure also provides for a method of treating hemophilia A in a subject comprising introducing into a target cell in need thereof (in particular a muscle cell or tissue) of the subject a therapeutically effective amount of a vector as described herein, optionally with a pharmaceutically acceptable carrier. While the vector can be introduced in the presence of a carrier, such a carrier is not required. The ceDNA vector selected comprises a nucleic acid sequence encoding an therapeutic protein (e.g., a FVIII protein) useful for treating hemophilia A.

[0409] The compositions and vectors provided herein can be used to deliver a therapeutic protein (e.g., a FVIII protein) for various purposes. In some embodiments, the transgene encodes an Therapeutic protein (e.g., a FVIII protein) that is intended to be used for research purposes, e.g., to create a somatic transgenic animal model harboring the transgene, e.g., to study the function of the therapeutic protein (e.g., a FVIII protein) product. In another example, the transgene encodes a therapeutic protein (e.g., a FVIII protein) that is intended to be used to create an animal model of hemophilia A. In some embodiments, the encoded therapeutic protein (e.g., a FVIII protein) is useful for the treatment or prevention of hemophilia A states in a mammalian subject. The therapeutic protein (e.g., a FVIII protein) can be transferred (e.g., expressed in) to a patient in a sufficient amount to treat hemophilia A associated with reduced expression, lack of expression or dysfunction of the gene.

[0410] In principle, the expression cassette can include a nucleic acid or any transgene that encodes a therapeutic protein (e.g., a FVIII protein) that is either reduced or absent due to a mutation or which conveys a therapeutic benefit when overexpressed is considered to be within the scope of the disclosure. Preferably, noninserted bacterial DNA is not present and preferably no bacterial DNA is present in the ceDNA compositions provided herein.

[0411] In another aspect, multiple vectors expressing different proteins or the same therapeutic protein (e.g., a FVIII protein) but operatively linked to different promoters or cis-regulatory elements can be delivered simultaneously or sequentially to the target cell, tissue, organ, or subject. Therefore, this strategy can allow for the gene therapy or gene delivery of multiple proteins simultaneously. It is also possible to separate different portions of a therapeutic protein (e.g., a FVIII protein) into separate vectors (e.g., different domains and/or co-factors required for functionality of a therapeutic protein (e.g., a FVIII protein)) which can be administered simultaneously or at different times, and can be separately regulatable, thereby adding an additional level of control of expression of a therapeutic protein (e.g., a FVIII protein).

[0412] The disclosure also provides for a method of treating hemophilia A in a subject comprising introducing into a target cell in need thereof (in particular a muscle cell or tissue) of the subject a therapeutically effective amount of a ceDNA vector as disclosed herein, optionally with a pharmaceutically acceptable carrier. While the ceDNA vector can be introduced in the presence of a carrier, such a carrier is not required. The ceDNA vector implemented comprises a nucleic acid sequence of interest useful for treating the hemophilia A. In particular, the ceDNA vector may comprise a desired exogenous DNA sequence operably linked to control elements capable of directing transcription of the desired polypeptide, protein, or oligonucleotide encoded by the exogenous DNA sequence when introduced into the subject. The ceDNA vector can be administered via any suitable route as provided above, and elsewhere herein.

### VIII. Methods of Delivery

[0413] In some embodiments, non-viral and viral vector for expression of a therapeutic protein as described herein can be delivered to a target cell in vitro or in vivo by various suitable methods. Vectors alone can be applied or injected. According to embodiments, the vectors can be delivered to a cell without the help of a transfection reagent or other physical means. Alternatively, according to other embodiments, the vectors for expression of a therapeutic protein (e.g., a FVIII protein) can be delivered using any art-known transfection reagent or other art-known physical means that facilitates entry of DNA into a cell, e.g., liposomes, alcohols, polylysine-rich compounds, arginine-rich compounds, calcium phosphate, microvesicles, microinjection, electroporation and the like.

[0414] One aspect of the technology described herein relates to a method of delivering a therapeutic protein (e.g., a FVIII protein) to a cell. Typically, for in vivo and in vitro methods, a non-viral or viral vector for expression of a therapeutic protein (e.g., a FVIII protein) as disclosed herein may be introduced into the cell using the methods as disclosed herein, as well as other methods known in the art. A vector for expression of a therapeutic protein (e.g., a FVIII protein) as disclosed herein are preferably administered to the cell in a biologically-effective amount. If the vector is administered to a cell in vivo (e.g., to a subject), a biologically-effective amount of the vector is an amount that is sufficient to result in transduction and expression of the therapeutic protein (e.g., a FVIII protein) in a target cell.

[0415] Exemplary modes of administration of a vector composition for expression of therapeutic protein (e.g., a FVIII protein) as disclosed herein includes oral, rectal, transmucosal, intranasal, inhalation (e.g., via an aerosol), buccal (e.g., sublingual), vaginal, intrathecal, intraocular, transdermal, intraendothelial, in utero (or in ovo), parenteral (e.g., intravenous, subcutaneous, intradermal, intracranial, intramuscular [including administration to skeletal, diaphragm and/or cardiac muscle], intrapleural, intracerebral, and intraarticular). Administration can be systemically or direct delivery to the liver or elsewhere (e.g., any kidneys, gallbladder, prostate, adrenal gland, heart, intestine, lung, and stomach).

[0416] Administration can be topical (e.g., to both skin and mucosal surfaces, including airway surfaces, and transdermal administration), intralymphatic, and the like, as well as direct tissue or organ injection (e.g., but not limited to, liver, but also to eye, muscles, including skeletal muscle, cardiac muscle, diaphragm muscle, or brain).

[0417] Methods for introduction of a nucleic acid vector for expression of therapeutic protein (e.g., a FVIII protein) as disclosed herein can be delivered into hematopoietic stem cells, for example, by the methods as described, for example, in U.S. Pat. No. 5,928,638, the contents of which is incorporated by reference in its entirety herein.

[0418] Administration of the vectors described herein (e.g., AAV, ceDNA) can be to any site in a subject, including, without limitation, a site selected from the group consisting of the liver and/or also eyes, brain, a skeletal muscle, a smooth muscle, the heart, the diaphragm, the airway epithelium, the kidney, the spleen, the pancreas, the skin.

[0419] The most suitable route in any given case will depend on the nature and severity of the condition being treated, ameliorated, and/or prevented and on the nature of the particular vector that is being used.

[0420] In one embodiment, delivery is to the liver. The vectors comprising the nucleic acids disclosed herein can be delivered to the liver through the hepatic artery, portal vein, or intravenously to produce therapeutic levels of therapeutic proteins or clotting factors in the blood. The capsid or vector is preferably suspended in a physiologically compatible transporter, and can be administered to a human or non-human mammalian patient. A person skilled in the art can easily select suitable transporters in view of the indication for which the transfer virus is directed. For example, a suitable carrier includes saline, which can be formulated with a variety of buffer solutions (eg, phosphate buffered saline). Other illustrative carriers include sterile saline, lactose, sucrose, calcium phosphate, gelatin, dextran, agar, pectin, sesame oil, and water.

[0421] In some embodiments, cells are removed from a subject, a ceDNA vector for expression of a therapeutic protein (e.g., a FVIII protein) as disclosed herein is introduced therein, and the cells are then replaced back into the subject. Methods of removing cells from subject for treatment ex vivo, followed by introduction back into the subject are known in the art (see, e.g., U.S. Pat. No. 5,399,346; the disclosure of which is incorporated herein in its entirety). Alternatively, a ceDNA vector is introduced into cells from another subject, into cultured cells, or into cells from any other suitable source, and the cells are administered to a subject in need thereof.

[0422] Cells transduced with a ceDNA vector for expression of a therapeutic protein (e.g., a FVIII protein) as disclosed herein are preferably administered to the subject in a “therapeutically-effective amount” in combination with a pharmaceutical carrier. Those skilled in the art will appreciate that the therapeutic effects need not be complete or curative, as long as some benefit is provided to the subject.

[0423] In some embodiments, a ceDNA vector for expression of therapeutic protein (e.g., a FVIII protein) as disclosed herein can encode a therapeutic protein (e.g., a FVIII protein) as described herein (sometimes called a transgene or heterologous nucleic acid sequence) that is to be produced in a cell in vitro, ex vivo, or in vivo. For example, in contrast to the use of the ceDNA vectors described herein in a method of treatment as discussed herein, in some embodiments a ceDNA vector for expression of Therapeutic protein (e.g., a FVIII protein) may be introduced into cultured cells and the expressed Therapeutic protein (e.g., a FVIII protein) isolated from the cells, e.g., for the production of antibodies and fusion proteins. In some embodiments, the cultured cells comprising a ceDNA vector for expression of Therapeutic protein (e.g., a FVIII protein) as disclosed herein can be used for commercial production of antibodies or fusion proteins, e.g., serving as a cell source for small or large scale biomanufacturing of antibodies or fusion proteins. In alternative embodiments, a ceDNA vector for expression of Therapeutic protein (e.g., a FVIII protein) as disclosed herein is introduced into cells in a host non-human subject, for in vivo production of antibodies or fusion proteins, including small scale production as well as for commercial large scale Therapeutic protein (e.g., a FVIII protein) production.

[0424] The ceDNA vectors for expression of Therapeutic protein (e.g., a FVIII protein) as disclosed herein can be used in both veterinary and medical applications. Suitable subjects for ex vivo gene delivery methods as described above include both avians (e.g., chickens, ducks, geese, quail, turkeys and pheasants) and mammals (e.g., humans, bovines, ovines, caprines, equines, felines, canines, and lagomorphs), with mammals being preferred. Human subjects are most preferred. Human subjects include neonates, infants, juveniles, and adults.

### Dose Ranges

[0425] Provided herein are methods of treatment comprising administering to the subject an effective amount of a composition comprising a vector encoding a therapeutic protein (e.g., a FVIII protein) as described herein. As will be appreciated by a skilled practitioner, the term “effective amount” refers to the amount of the composition administered that results in expression of the therapeutic protein (e.g., a FVIII protein) in a “therapeutically effective amount” for the treatment of hemophilia A.

[0426] In vivo and/or in vitro assays can optionally be employed to help identify optimal dosage ranges for use. The precise dose to be employed in the formulation will also depend on the route of administration, and the seriousness of the condition, and should be decided according to the judgment of the person of ordinary skill in the art and each subject's circumstances. Effective doses can be extrapolated from dose-response curves derived from in vitro or animal model test systems.

[0427] for expression of therapeutic protein (e.g., a FVIII protein) as disclosed herein is administered in sufficient amounts to transfect the cells of a desired tissue and to provide sufficient levels of gene transfer and expression without undue adverse effects. Conventional and pharmaceutically acceptable routes of administration include, but are not limited to, those described above in the “Administration” section, such as direct delivery to the selected organ (e.g., intraportal delivery to the liver), oral, inhalation (including intranasal and intratracheal delivery), intraocular, intravenous, intramuscular, subcutaneous, intradermal, intratumoral, and other parental routes of administration. Routes of administration can be combined, if desired.

[0428] The dose of the amount of a vector for expression of a therapeutic protein (e.g., a FVIII protein) as disclosed herein required to achieve a particular “therapeutic effect,” will vary based on several factors including, but not limited to: the route of nucleic acid administration, the level of gene or RNA expression required to achieve a therapeutic effect, the specific disease or disorder being treated, and the stability of the gene(s), RNA product(s), or resulting expressed protein(s). One of skill in the art can readily determine a vector dose range to treat a patient having a particular disease or disorder based on the aforementioned factors, as well as other factors that are well known in the art.

[0429] Dosage regime can be adjusted to provide the optimum therapeutic response. For example, the oligonucleotide can be repeatedly administered, e.g., several doses can be administered daily, or the dose can be proportionally reduced as indicated by the exigencies of the therapeutic situation. One of ordinary skill in the art will readily be able to determine appropriate doses and schedules of administration of the subject oligonucleotides, whether the oligonucleotides are to be administered to cells or to subjects.

[0430] An FVIII therapeutic protein can be expressed in a subject for at least 1 week, at least 2 weeks, at least 1 month, at least 2 months, at least 6 months, at least 12 months/one year, at least 2 years, at least 5 years, at least 10 years, at least 15 years, at least 20 years, at least 30 years, at least 40 years, at least 50 years or more. Long-term expression can be achieved by repeated administration of the ceDNA vectors described herein at predetermined or desired intervals.

[0431] The duration of treatment depends upon the subject's clinical progress and responsiveness to therapy. Continuous, relatively low maintenance doses are contemplated after an initial higher therapeutic dose.

### Unit Dosage Forms

[0432] In some embodiments, the pharmaceutical compositions comprising a viral or non-viral vector comprising an expression cassette as described herein, for expression of a therapeutic protein (e.g., a FVIII protein) as disclosed herein can conveniently be presented in unit dosage form. A unit dosage form will typically be adapted to one or more specific routes of administration of the pharmaceutical composition. In some embodiments, the unit dosage form is adapted for droplets to be administered directly to the eye. In some embodiments, the unit dosage form is adapted for administration by inhalation. In some embodiments, the unit dosage form is adapted for administration by a vaporizer. In some embodiments, the unit dosage form is adapted for administration by a nebulizer. In some embodiments, the unit dosage form is adapted for administration by an aerosolizer. In some embodiments, the unit dosage form is adapted for oral administration, for buccal administration, or for sublingual administration. In some embodiments, the unit dosage form is adapted for intravenous, intramuscular, or subcutaneous administration. In some embodiments, the unit dosage form is adapted for subretinal injection, suprachoroidal injection or intravitreal injection.

[0433] In some embodiments, the unit dosage form is adapted for intrathecal or intracerebroventricular administration. In some embodiments, the pharmaceutical composition is formulated for topical administration. The amount of active ingredient which can be combined with a carrier material to produce a single dosage form will generally be that amount of the compound which produces a therapeutic effect.

### IX. Methods of Treatment

[0434] The technology described herein also demonstrates methods for making, as well as methods of using the disclosed viral and non-viral vectors for expression of a therapeutic protein in a variety of ways, including, for example, ex vivo, ex situ, in vitro and in vivo applications, methodologies, diagnostic procedures, gene editing and/or gene therapy regimens to treat a subject suffering from a genetic disorder.

[0435] According to some embodiments, the subject is a human. According to some embodiments, the genetic disorder is selected from the group consisting of sickle-cell anemia, melanoma, hemophilia A (clotting factor VIII (FVIII) deficiency) and hemophilia B (clotting factor IX (FIX) deficiency), cystic fibrosis (CFTR), familial hypercholesterolemia (LDL receptor defect), hepatoblastoma, Wilson disease, phenylketonuria (PKU), congenital hepatic porphyria, inherited disorders of hepatic metabolism, Lesch Nyhan syndrome, sickle cell anemia, thalassaemias, xeroderma pigmentosum, Fanconi's anemia, retinitis pigmentosa, ataxia telangiectasia, Bloom's syndrome, retinoblastoma, mucopolysaccharide storage diseases (e.g., Hurler syndrome (MPS Type I), Scheie syndrome (MPS Type I S), Hurler-Scheie syndrome (MPS Type I H-S), Hunter syndrome (MPS Type II), Sanfilippo Types A, B, C, and D (MPS Types III A, B, C, and D), Morquio Types A and B (MPS IVA and MPS IVB), Maroteaux-Lamy syndrome (MPS Type VI), Sly syndrome (MPS Type VII), hyaluronidase deficiency (MPS Type IX)), Niemann-Pick Disease Types A/B, C1 and C2, Fabry disease, Schindler disease, GM2-gangliosidosis Type II (Sandhoff Disease), Tay-Sachs disease, Metachromatic Leukodystrophy, Krabbe disease, Mucolipidosis Type I, II/III and IV, Sialidosis Types I and II, Glycogen Storage disease Types I and II (Pompe disease), Gaucher disease Types I, II and III, Fabry disease, cystinosis, Batten disease, Aspartylglucosaminuria, Salla disease, Danon disease (LAMP-2 deficiency), Lysosomal Acid Lipase (LAL) deficiency, neuronal ceroid lipofuscinoses (CLN1-8, INCL, and LINCL), sphingolipidoses, galactosialidosis, amyotrophic lateral sclerosis (ALS), Parkinson's disease, Alzheimer's disease, Huntington's disease, spinocerebellar ataxia, spinal muscular atrophy, Friedreich's ataxia, Duchenne muscular dystrophy (DMD), Becker muscular dystrophies (BMD), dystrophic epidermolysis bullosa (DEB), ectonucleotide pyrophosphatase 1 deficiency, generalized arterial calcification of infancy (GACI), Leber Congenital Amaurosis, Stargardt macular dystrophy (ABCA4), ornithine transcarbamylase (OTC) deficiency, Usher syndrome, alpha-1 antitrypsin deficiency, progressive familial intrahepatic cholestasis (PFIC) type I (ATP8B1 deficiency), type II (ABCB11), type III (ABCB4), or type IV (TJP2) and Cathepsin A deficiency. According to some embodiments, the genetic disorder is Leber congenital amaurosis (LCA). According to some embodiments, the LCA is LCA10. According to some embodiments, the genetic disorder is Niemann-Pick disease. According to some embodiments, the genetic disorder is Stargardt macular dystrophy. According to some embodiments, the genetic disorder is glucose-6-phosphatase (G6Pase) deficiency (glycogen storage disease type I) or Pompe disease (glycogen storage disease type II). According to some embodiments, the genetic disorder is hemophilia A (Factor VIII deficiency). According to some embodiments, the genetic disorder is hemophilia B (Factor IX deficiency). According to some embodiments, the genetic disorder is hunter syndrome (Mucopolysaccharidosis II). According to some embodiments, the genetic disorder is cystic fibrosis. According to some embodiments, the genetic disorder is dystrophic epidermolysis bullosa (DEB). According to some embodiments, the genetic disorder is phenylketonuria (PKU). According to some embodiments, the genetic disorder is progressive familial intrahepatic cholestasis (PFIC). According to some embodiments, the genetic disorder is Wilson disease. According to some embodiments, the genetic disorder is Gaucher disease Type I, II or III.

[0436] In one embodiment, the expressed therapeutic protein (e.g., a FVIII protein) expressed from a vector as disclosed herein is functional for the treatment of disease. In a preferred embodiment, the therapeutic protein (e.g., a FVIII protein) does not cause an immune system reaction, unless so desired.

[0437] Provided herein is a method of treating hemophilia A in a subject comprising introducing into a target cell in need thereof (for example, a muscle cell or tissue, or other affected cell type) of the subject a therapeutically effective amount of a ceDNA vector for expression of therapeutic protein (e.g., a FVIII protein) as disclosed herein, optionally with a pharmaceutically acceptable carrier. While the vector can be introduced in the presence of a carrier, such a carrier is not required. The vector implemented comprises a nucleic acid sequence encoding a therapeutic protein (e.g., a FVIII protein) as described herein useful for treating the disease. In particular, a ceDNA vector for expression of therapeutic protein (e.g., a FVIII protein) as disclosed herein may comprise a desired therapeutic protein (e.g., a FVIII protein) DNA sequence operably linked to control elements capable of directing transcription of the desired therapeutic protein (e.g., a FVIII protein) encoded by the exogenous DNA sequence when introduced into the subject. The ceDNA vector for expression of therapeutic protein (e.g., a FVIII protein) as disclosed herein can be administered via any suitable route as provided above, and elsewhere herein.

[0438] Disclosed herein are ceDNA vector compositions and formulations for expression of Therapeutic protein (e.g., a FVIII protein) as disclosed herein that include one or more of the ceDNA vectors of the present disclosure together with one or more pharmaceutically-acceptable buffers, diluents, or excipients. Such compositions may be included in one or more diagnostic or therapeutic kits, for diagnosing, preventing, treating or ameliorating one or more symptoms of hemophilia A. In one aspect the disease, injury, disorder, trauma or dysfunction is a human disease, injury, disorder, trauma or dysfunction.

[0439] Another aspect of the technology described herein provides a method for providing a subject in need thereof with a diagnostically- or therapeutically-effective amount of a viral or non-viral vector for expression of therapeutic protein (e.g., a FVIII protein) as disclosed herein, the method comprising providing to a cell, tissue or organ of a subject in need thereof, an amount of the vector as disclosed herein; and for a time effective to enable expression of the therapeutic protein (e.g., a FVIII protein) from the vector thereby providing the subject with a diagnostically- or a therapeutically-effective amount of the therapeutic protein (e.g., a FVIII protein) expressed by the vector. In a further aspect, the subject is human.

[0440] Another aspect of the technology described herein provides a method for diagnosing, preventing, treating, or ameliorating at least one or more symptoms of hemophilia A, a disorder, a dysfunction, an injury, an abnormal condition, or trauma in a subject. In an overall and general sense, the method includes at least the step of administering to a subject in need thereof one or more of the disclosed ceDNA vector for a therapeutic protein (e.g., a FVIII protein) production, in an amount and for a time sufficient to diagnose, prevent, treat or ameliorate the one or more symptoms of the disease, disorder, dysfunction, injury, abnormal condition, or trauma in the subject. In such an embodiment, the subject can be evaluated for efficacy of the therapeutic protein (e.g., a FVIII protein), or alternatively, detection of the therapeutic protein (e.g., a FVIII protein) or tissue location (including cellular and subcellular location) of the therapeutic protein (e.g., a FVIII protein) in the subject. As such, the ceDNA vector for expression of therapeutic protein (e.g., a FVIII protein) as disclosed herein can be used as an in vivo diagnostic tool, e.g., for the detection of cancer or other indications. In a further aspect, the subject is human.

[0441] Another aspect is use of a viral or non-viral vector for expression of a therapeutic protein (e.g., a FVIII protein) as disclosed herein as a tool for treating or reducing one or more symptoms of hemophilia A or disease states. There are a number of inherited diseases in which defective genes are known, and typically fall into two classes: deficiency states, usually of enzymes, which are generally inherited in a recessive manner, and unbalanced states, which may involve regulatory or structural proteins, and which are typically but not always inherited in a dominant manner. For unbalanced disease states, a vector for expression of a therapeutic protein (e.g., a FVIII protein) as disclosed herein can be used to create hemophilia A state in a model system, which could then be used in efforts to counteract the disease state. Thus, the vector for expression of a therapeutic protein (e.g., a FVIII protein) as disclosed herein permit the treatment of genetic diseases. As used herein, hemophilia A state is treated by partially or wholly remedying the deficiency or imbalance that causes the disease or makes it more severe.

[0442] As used herein, the term “therapeutically effective amount” is an amount of an expressed FVIII therapeutic protein, or functional fragment thereof that is sufficient to produce a statistically significant, measurable change in expression of a disease biomarker or reduction in a given disease symptom (see “Efficacy Measurement” below). Such effective amounts can be gauged in clinical trials as well as animal studies for a given ceDNA composition.

[0443] The efficacy of a given treatment for hemophilia A, can be determined by the skilled clinician. However, a treatment is considered “effective treatment,” as the term is used herein, if any one or all of the signs or symptoms of the disease or disorder is/are altered in a beneficial manner, or other clinically accepted symptoms or markers of disease are improved, or ameliorated, e.g., by at least 10% following treatment with a viral or non-viral vector encoding FVIII, or a functional fragment thereof. Efficacy can also be measured by failure of an individual to worsen as assessed by stabilization of the disease, or the need for medical interventions (i.e., progression of the disease is halted or at least slowed). Methods of measuring these indicators are known to those of skill in the art and/or described herein. Treatment includes any treatment of a disease in an individual or an animal (some non-limiting examples include a human, or a mammal) and includes: (1) inhibiting the disease, e.g., arresting, or slowing progression of the disease or disorder; or (2) relieving the disease, e.g., causing regression of symptoms; and (3) preventing or reducing the likelihood of the development of the disease, or preventing secondary diseases/disorders associated with the disease, such as liver or kidney failure. An effective amount for the treatment of a disease means that amount which, when administered to a mammal in need thereof, is sufficient to result in effective treatment as that term is defined herein, for that disease.

[0444] Efficacy of an agent can be determined by assessing physical indicators that are particular to hemophilia A. Standard methods of analysis of hemophilia A indicators are known in the art.

### Host Cells

[0445] In some embodiments, a non-viral or viral vector for expression of a therapeutic protein (e.g., a FVIII protein) as disclosed herein delivers the therapeutic protein (e.g., a FVIII protein) transgene into a subject host cell.

[0446] In some embodiments, the cells are hepatic (i.e., liver) cells.

[0447] In some embodiments, the cells are photoreceptor cells. In some embodiments, the cells are RPE cells. In some embodiments, the subject host cell is a human host cell, including, for example blood cells, stem cells, hematopoietic cells, CD34⁺ cells, cancer cells, vascular cells, muscle cells, pancreatic cells, neural cells, ocular or retinal cells, epithelial or endothelial cells, dendritic cells, fibroblasts, or any other cell of mammalian origin, including, without limitation, lung cells, cardiac cells, pancreatic cells, intestinal cells, diaphragmatic cells, renal (i.e., kidney) cells, neural cells, blood cells, bone marrow cells, or any one or more selected tissues of a subject for which gene therapy is contemplated. In one aspect, the subject host cell is a human host cell.

[0448] The present disclosure also relates to recombinant host cells as mentioned above, including a non-viral or viral vector as disclosed herein, for expression of a therapeutic protein (e.g., a FVIII protein) as disclosed herein. Thus, one can use multiple host cells depending on the purpose as is obvious to the skilled artisan. A construct or a vector for expression of a therapeutic protein (e.g., a FVIII protein) as disclosed herein including donor sequence is introduced into a host cell so that the donor sequence is maintained as a chromosomal integrant as described earlier. The term host cell encompasses any progeny of a parent cell that is not identical to the parent cell due to mutations that occur during replication. The choice of a host cell will to a large extent depend upon the donor sequence and its source.

[0449] The host cell may also be a eukaryote, such as a mammalian, insect, plant, or fungal cell. In one embodiment, the host cell is a human cell (e.g., a primary cell, a stem cell, or an immortalized cell line). In some embodiments, the host cell can be administered a vector for expression of a therapeutic protein (e.g., a FVIII protein) as disclosed herein ex vivo and then delivered to the subject after the gene therapy event. A host cell can be any cell type, e.g., a somatic cell or a stem cell, an induced pluripotent stem cell, or a blood cell, e.g., T-cell or B-cell, or bone marrow cell. In certain embodiments, the host cell is an allogenic cell. For example, T-cell genome engineering is useful for cancer immunotherapies, disease modulation such as HIV therapy (e.g., receptor knock out, such as CXCR4 and CCR5) and immunodeficiency therapies. MHC receptors on B-cells can be targeted for immunotherapy. In some embodiments, gene modified host cells, e.g., bone marrow stem cells, e.g., CD34⁺ cells, or induced pluripotent stem cells can be transplanted back into a patient for expression of a therapeutic protein.

### Additional Diseases for Gene Therapy

[0450] In general, a viral or non-viral vector as described herein for expression of a therapeutic protein (e.g., a FVIII protein) as disclosed herein can be used to deliver any therapeutic protein in accordance with the description above to treat, prevent, or ameliorate the symptoms associated with aberrant protein expression or gene expression in a subject.

[0451] In some embodiments, a viral or non-viral vector for expression of a therapeutic protein as disclosed herein can be used to deliver a therapeutic protein to skeletal, cardiac or diaphragm muscle, for production of a therapeutic protein for secretion and circulation in the blood or for systemic delivery to other tissues to treat, ameliorate, and/or prevent a disease or disorder characterized by abberant gene expression.

Testing for Successful Gene Expression Using a ceDNA Vector

[0452] Assays well known in the art can be used to test the efficiency of gene delivery of a therapeutic protein (e.g., a FVIII protein) by a vector can be performed in both in vitro and in vivo models. Levels of the expression of the therapeutic protein (e.g., a FVIII protein) can be assessed by one skilled in the art by measuring mRNA and protein levels of the therapeutic protein (e.g., a FVIII protein) (e.g., reverse transcription PCR, western blot analysis, and enzyme-linked immunosorbent assay (ELISA)). In one embodiment, expression cassette comprises a reporter protein that can be used to assess the expression of the therapeutic protein (e.g., a FVIII protein), for example by examining the expression of the reporter protein by fluorescence microscopy or a luminescence plate reader. For in vivo applications, protein function assays can be used to test the functionality of a given therapeutic protein (e.g., a FVIII protein) to determine if gene expression has successfully occurred. One skilled will be able to determine the best test for measuring functionality of a therapeutic protein (e.g., a FVIII protein) expressed by the ceDNA vector in vitro or in vivo.

[0453] It is contemplated herein that the effects of gene expression of a therapeutic protein (e.g., a FVIII protein) from the vector in a cell or subject can last for at least 1 month, at least 2 months, at least 3 months, at least four months, at least 5 months, at least six months, at least 10 months, at least 12 months, at least 18 months, at least 2 years, at least 5 years, at least 10 years, at least 20 years, or can be permanent.

[0454] In some embodiments, a therapeutic protein (e.g., a FVIII protein) in the expression cassette, expression construct, or non-viral or viral vector described herein can be codon optimized for the host cell. As used herein, the term “codon optimized” or “codon optimization” refers to the process of modifying a nucleic acid sequence for enhanced expression in the cells of the vertebrate of interest, e.g., mouse or human (e.g., humanized), by replacing at least one, more than one, or a significant number of codons of the native sequence (e.g., a prokaryotic sequence) with codons that are more frequently or most frequently used in the genes of that vertebrate. Various species exhibit particular bias for certain codons of a particular amino acid. Typically, codon optimization does not alter the amino acid sequence of the original translated protein. Optimized codons can be determined using e.g., Aptagen's GENE FORGE® codon optimization and custom gene synthesis platform (Aptagen, Inc.) or another publicly available database.

Determining Efficacy by Assessing Therapeutic Protein Expression from the Vector

[0455] Essentially any method known in the art for determining protein expression can be used to analyze expression of a therapeutic protein (e.g., a FVIII protein) from a viral or non-viral vector. Non-limiting examples of such methods/assays include enzyme-linked immunoassay (ELISA), affinity ELISA, ELISPOT, serial dilution, flow cytometry, surface plasmon resonance analysis, kinetic exclusion assay, mass spectrometry, Western blot, immunoprecipitation, and PCR.

[0456] For assessing a therapeutic protein (e.g., a FVIII protein) expression in vivo, a biological sample can be obtained from a subject for analysis. Exemplary biological samples include a biofluid sample, a body fluid sample, blood (including whole blood), serum, plasma, urine, saliva, a biopsy and/or tissue sample etc. A biological sample or tissue sample can also refer to a sample of tissue or fluid isolated from an individual including, but not limited to, tumor biopsy, stool, spinal fluid, pleural fluid, nipple aspirates, lymph fluid, the external sections of the skin, respiratory, intestinal, and genitourinary tracts, tears, saliva, breast milk, cells (including, but not limited to, blood cells), tumors, organs, and also samples of in vitro cell culture constituent. The term also includes a mixture of the above-mentioned samples. The term “sample” also includes untreated or pretreated (or pre-processed) biological samples. In some embodiments, the sample used for the assays and methods described herein comprises a serum sample collected from a subject to be tested.

### X. Various Applications of Viral and Non-Viral Vectors

[0457] As disclosed herein, the viral and non-viral vectors for expression of a therapeutic protein as described herein can be used to express a therapeutic protein for a range of purposes. In one embodiment, the vector expressing a therapeutic protein (e.g., a FVIII protein) can be used to create a somatic transgenic animal model harboring the transgene, e.g., to study the function or disease progression of hemophilia A. In some embodiments, a ceDNA vector expressing a therapeutic protein (e.g., a FVIII protein) is useful for the treatment, prevention, or amelioration of hemophilia A states or disorders in a mammalian subject.

[0458] In some embodiments the therapeutic protein (e.g., a FVIII protein) can be expressed from the vector in a subject in a sufficient amount to treat a disease associated with increased expression, increased activity of the gene product, or inappropriate upregulation of a gene.

[0459] In some embodiments the therapeutic protein (e.g., a FVIII protein) can be expressed from the vector in a subject in a sufficient amount to treat hemophilia A with a reduced expression, lack of expression or dysfunction of a protein.

[0460] It will be appreciated by one of ordinary skill in the art that the transgene may not be an open reading frame of a gene to be transcribed itself; instead it may be a promoter region or repressor region of a target gene, and the ceDNA vector may modify such region with the outcome of so modulating the expression of the FVIII gene.

[0461] The compositions and viral and non-viral vectors for expression of a therapeutic protein (e.g., a FVIII protein) as disclosed herein can be used to deliver a therapeutic protein (e.g., a FVIII protein) for various purposes as described above.

[0462] In some embodiments, the transgene encodes one or more therapeutic proteins which are useful for the treatment, amelioration, or prevention of hemophilia A states in a mammalian subject. The therapeutic protein (e.g., a FVIII protein) expressed by the vector is administered to a patient in a sufficient amount to treat hemophilia A associated with an abnormal gene sequence, which can result in any one or more of the following: increased protein expression, over activity of the protein, reduced expression, lack of expression or dysfunction of the target gene or protein.

[0463] In some embodiments, the vectors for expression of a therapeutic protein (e.g., a FVIII protein) as disclosed herein are envisioned for use in diagnostic and screening methods, whereby a therapeutic protein (e.g., a FVIII protein) is transiently or stably expressed in a cell culture system, or alternatively, a transgenic animal model.

[0464] Another aspect of the technology described herein provides a method of transducing a population of mammalian cells with a ceDNA vector for expression of a therapeutic protein (e.g., a FVIII protein) as disclosed herein. In an overall and general sense, the method includes at least the step of introducing into one or more cells of the population, a composition that comprises an effective amount of one or more of the ceDNA vectors for expression of a therapeutic protein (e.g., a FVIII protein) as disclosed herein.

[0465] Additionally, the present disclosure provides compositions, as well as therapeutic and/or diagnostic kits that include one or more of the disclosed ceDNA vectors for expression of Therapeutic protein (e.g., a FVIII protein) as disclosed herein or ceDNA compositions, formulated with one or more additional ingredients, or prepared with one or more instructions for their use.

[0466] A cell to be administered a ceDNA vector for expression of a therapeutic protein as disclosed herein may be of any type, including but not limited to neural cells (including cells of the peripheral and central nervous systems, in particular, brain cells), lung cells, retinal cells, epithelial cells (e.g., gut and respiratory epithelial cells), muscle cells, dendritic cells, pancreatic cells (including islet cells), hepatic cells, myocardial cells, bone cells (e.g., bone marrow stem cells), hematopoietic stem cells, spleen cells, keratinocytes, fibroblasts, endothelial cells, prostate cells, germ cells, and the like. Alternatively, the cell may be any progenitor cell. As a further alternative, the cell can be a stem cell (e.g., neural stem cell, liver stem cell). As still a further alternative, the cell may be a cancer or tumor cell. Moreover, the cells can be from any species of origin, as indicated above.

Production and Purification of ceDNA Vectors Expressing a Therapeutic Protein

[0467] The viral and non-viral vectors disclosed herein are to be used to produce a therapeutic protein (e.g., a FVIII protein) either in vitro or in vivo. The therapeutic protein (e.g., a FVIII protein) that is produced in this manner can be isolated, tested for a desired function, and purified for further use in research or as a therapeutic treatment.

[0468] Each system of protein production has its own advantages/disadvantages. While proteins produced in vitro can be easily purified and can proteins in a short time, proteins produced in vivo can have post-translational modifications, such as glycosylation.

[0469] A therapeutic protein produced using viral and non-viral vectors described herein can be purified using any method known to those of skill in the art, for example, ion exchange chromatography, affinity chromatography, precipitation, or electrophoresis.

[0470] A therapeutic protein produced by the methods and compositions described herein can be tested for binding to the desired target protein.

[0471] The technology described herein is further illustrated by the following examples which in no way should be construed as being further limiting. It should be understood that this disclosure is not limited to the particular methodology, protocols, and reagents, etc., described herein and as such can vary. The terminology used herein is for the purpose of describing particular embodiments only and is not intended to limit the scope of the present disclosure, which is defined solely by the claims.

### Examples

[0472] The following examples are provided by way of illustration not limitation.

### Example 1: In Silico Analyses for Identification of Potentially Improved Human Liver-Specific Promoter

[0473] The human SERPINA1 enhancer (hSerpEnh) is often used to drive liver-specific gene expression (Chuah et al. (2014) Mol Ther 22(9): 1605-1613). Multiple bioinformatic analyses were used to inform modification of the hSerpEnh for improved function and are described below.

### Analysis of Evolutionary Conservation

[0474] Cis-regulatory regions with similar sequence and similar sequence contexts often have conserved function but distinct performance attributes. A curated collection of more than 100 vertebrate genomes were analyzed to identify a set of predicted functionally conserved enhancers with divergent sequence. The function of a range of these enhancer elements were assessed to identify higher-expressing modules. Selections were also prioritized based on amount of CpG content and poly C and poly G sequence motifs.

[0475] 20 homologous sequences of human SERPINA1 enhancer region were identified and selected (see FIGS. 1A-1B) to screen for SerpEnh variants with improved expression characteristics. These sequences are listed in Table 4. FIG. 1A and FIG. 1B depict SERPINA1 sequences and alignment of conserved enhancer regions of human and 20 other vertebrates. 115 non-human vertebrate genomes were initially assessed for conserved SERPINA1 enhancer regions using the UCSC multiz100way and multiz30way multiple alignments. Depicted in FIGS. 1A-1B are the conserved SERPINA1 enhancer regions from 20 vertebrates with >90% identity to the human SERPINA1 enhancer, which are mapped to the human SERPINA1 enhancer sequence with Geneious. Highlighted nucleotides in the aligned sequences represent differences from the human reference sequence. Identification and modification of non-Consensus Transcription Factor Binding Sites (TFBS)

[0476] Transcription factor binding sites can be identified by in silico analysis and represent one sequence across a family of possible functional sites that is often divergent from the known consensus sequence. Several important liver-specific transcription factor binding sites were identified that diverged from consensus.

[0477] The hSerpEnh contains near-consensus binding sites for many transcription factors, including HNF4 and FOXA, which are key regulators of hepatic gene expression (see FIG. 2). Orange arrows represent TF binding motifs described by Chuah et al. (2014). Red arrows represent TF binding motifs identified by our independent analysis (FIG. 2). FIMO (Bailey et al. (2009) Nucleic Acids Res 37: W202-W208) was used to scan the human SERPINA1 enhancer sequence with position weight matrices for TFs generated by the ENCODE Project. Representative motif matches with p<1e-4 are displayed. Sequence logos representing position weight matrices for FOXA (JASPAR MA0148.3), ERR2 (HOCOMOCO ERR2_HUMAN.H11MO.0.A), and HNFA (HNF4A_HUMAN.H11MO.0.A) are shown above the corresponding motifs identified in our analysis (FIG. 2). Positions where the human SERPINA1 sequence differs from the most highly preferred nucleotide in the sequence logos are boxed and highlighted in red (FIG. 2).

[0478] Off-consensus nucleotides were modified to reinstate the consensus sequences based on the hypothesis that they would result in higher affinity for the transcription factor and drive higher levels of transcription initiation.

### CpG Content Minimization

[0479] Promoters often contain CpG dinucleotides that are undesirable for gene therapy applications. CpGs can impact expression durability through stimulation of the innate immune system and through methylation-based silencing. Nevertheless, removal of CpGs from cis-regulatory regions is non-trivial as they often play important functional roles in driving expression.

[0480] Multiple bioinformatic analyses were employed to inform removal of CpG from hSerpEnh (i.e., CpG ablation) (see FIG. 3). The evolutionary conservation analysis provided a rational path for selective removal of CpGs in the enhancer without disrupting function. Enhancer regions from diverse species that did not contain some or all CpGs but were likely to maintain function were identified. The human SERPINA1 enhancer contains one internal CpG and the potential to form CpGs at its 5′ and 3′ ends (highlighted in red and boxed in the “hSerpEnh” track). Low sequence conservation, the presence of human SNPs that are not known to be associated with disease, and the absence of predicted transcription factor (TF) binding sites were assessed to inform sequence changes to ablate the central CpG and the remove potential for CpG formation at the ends of the sequence.

[0481] Further, it was hypothesized that positions within the human SERPINA1 enhancer that are poorly conserved between species are less consequential to the enhancer's function, and thus better targets for sequence modifications that lead to CpG ablations. To assess sequence conservation at each position in the human SERPINA1 enhancer, 115 non-human vertebrate genomes were evaluated for conserved SERPINA1 enhancer elements in the UCSC multiz100way and multiz30way multiple alignments. Of these 115 genomes, 43 contained conserved SERPINA1 enhancer regions, which were aligned using the MUSCLE alignment algorithm. The “Conservation” track displays the mean pairwise identity between all pairs of nucleotides in the aligned sequences at each position in the enhancer. Green bars represent 100% identity and dark yellow bars represent 30 to <100% identity. Nucleotides that differed from the human sequence, but were utilized in the aligned position in other genomes were preferentially used for CpG ablations. It was further hypothesized that positions in CpGs that contain non-disease associated SNPs in the human population would be preferable targets for CpG ablation, and that changing the sequence to match non-disease associated SNPs would minimize changes to enhancer function. The “SNPs” track depicts SNPs within the human SERPINA1 enhancer that are cataloged in the 1000 Genomes Project and dbSNP that are not known to be associated with disease. Changes were made to ensure that the SERPINA1 sequence to ablate CpGs did not interfere with predicted transcription binding (TF) sites. The top track depicts selected TF motifs from our motif analysis (described in FIG. 2), in which it was found that TF motif clusters and the motifs for TFs that play key roles in hepatic expression had minimal overlap with the internal CpG.

[0482] CpG-free elements were either tested directly for function or used as a reference for making functionally permissive substitutions in the native human enhancer region.

[0483] The variants of SerpEnh generated from the bioinformatic analyses above are listed in the tables below, e.g., Table 4.

[0484] The results are described in the following Examples.

TABLE 3
Selected conserved SERPINA1 enhancer variants from human and 20 other vertebrates

| | | | SEQ ID |
|---|---|---|---|
| Name | Species | SERPINA1 enhancer region sequence | NO: |
| hSerpEnh | Human | GGGGGAGGCTGCTGGTGAATATTAACCAAGGTCACCCCAGTTATC | 137 |
| | | GGAGGAGCAAACAGGGGCTAAGTCCAC | |
| SerpEnh_Rhesus | Rhesus | GGGGGAGGCTGCTGGTGAATATTAACCAAGATCACCCCAGTTACC | 117 |
| | | GGAGGAGCAAACAGGGACTAAGTTCAC | |
| SerpEnh_Squirrel_ | Squirrel monkey | GGGGGATGCTGCTGGTGAATATTAACCAAGGTCAGCCCAGTTACC | 118 |
| monkey | | GGAGGAGCAAACAGGGCTAAGTCCAC | |
| SerpEnh_Bactrian_ | Bactrian camel | GGGGGAGGCTGCTGGTGAATATTAACCAAGGTCACCTCAGTTATC | 119 |
| camel | | GGAGGAGCAAACAAGGACTAAGTCCAT | |
| SerpEnh_Ferret | Ferret | GGGGGAGGTTGCTGGTGAATATTAACTAAGGTCACCCCAGTTATC | 120 |
| | | GGAGGAGCAAACAGGGACTAAGTCCAG | |
| SerpEnh_Mouse_ | Mouse lemur | GAGGGAGGGCGCTGGTGAATATTAACCAAGGTCACCCAGTTATCG | 121 |
| lemur | | GGGAGCAAACAGGGGCTAAGTCCAT | |
| SerpEnh_Chinese_ | Chinese tree shrew | GGAGGCTGTTGGTGAATATTAACCAAGGTCACCCCAGTTATCGGA | 82 |
| tree_shrew | | GGAGCAAACAAGGGCTAAGTCCAC | |
| SerpEnh_Prairie_ | Prairie vole | GGGGGAGTCTGCTAGTGAATATTAACCAAGGTCAGCACAGTTATC | 123 |
| vole | | GGAGGAGCAAACAGAGAGGGACTAAGTCCAT | |
| SerpEnh_Cat | Cat | GGGGGAGGCTGCTGGTGAATATTAACTAAGGTCACCCCAGTTATC | 124 |
| | | AGAGGAGCAAATAGGGACTAAGTCCAT | |
| SerpEnh_Panda | Panda | GGGGGAGGTTGCTGGTGAATATTAACTAAGGTCACCCCAGTTATC | 125 |
| | | AGAGGAGCAAACAGGGACTAAGTCCAG | |
| SerpEnh_David's_ | David's myotis | GGGGGAGGCTGCTGGTGAATATTAACCAAGGTCAACTCAGTTATC | 126 |
| myotis | | AGAGGAGCAAACAGGGACTAAGTCCAT | |
| SerpEnh_Coquerel's_ | Coquerel's sifaka | GAGGGAGGGCACTGGTGAATATTAACCAAGGTCACCCAGTTATCG | 127 |
| sifaka | | GGGAGCAAACAGGGGCTAAGTCCAT | |
| SerpEnh_Dog | Dog | GGGGGTGGTTGCTGGTGAATATTAACCAAAGTCACCCCGGTTATC | 128 |
| | | GGAGGAGCAAACAGGGACTAAGTCCAT | |
| SerpEnh_Armadillo | Armadillo | GGGGGAGGCTGCGAGTGAACATTAACCAAGGTCACCCAGTTATCA | 129 |
| | | GAGGAGCAAACAGGGACTAAGTCCAC | |
| SerpEnh_Dolphin | Dolphin | GTGGGAGGCTGCTGGTGAATATTAACCAAGGTCACCCCAGTTATC | 130 |
| | | AGAGGAGTAAACAGGGACTAAGCTCAC | |
| SerpEnh_Bushbaby | Bushbaby | GGGGGAAGCTACTGGTGAATATTAACCAAGGTCACCCAGTTATCA | 131 |
| | | GGGAGCAAACAGGAGCTAAGTCCAT | |
| SerpEnh_Lesser_ | Lesser Egyptian | GGGGAATCTGCTAGTGAATATTAACCAAGGTCCCCGCAGTTATTG | 132 |
| Egyptian_jerboa | jerboa | GAGGAGCAAACAGGCAGGGACTAAGTCCAA | |
| SerpEnh_Rabbit | Rabbit | GGGGCAGCTGCAGGTGAATATTAACCAAGGTCACGCCAGTTATCG | 133 |
| | | GAGGAGCAAACAGGAGTTAAGTCCAC | |
| SerpEnh_Tibetan_ | Tibetan antelope | GGGGGAGGCTGCTGGTAAACATTAACCAAGGTCACCCCAGTTATC | 134 |
| antelope | | AGAGGAACAAACAAGGACTAAGTCCAT | |
| SerpEnh_Big_ | Big brown bat | GGGGGAGGCTGCTGGTGAATATTAACCAGGGTCAACTCAGTTATC | 135 |
| brown_bat | | AGAGGAGCAAACAGGACTAAGTCCAT | |
| SerpEnh_ | Starnosed mole | TGGGGAGGCTGCTGGTGAATATTAACTAAGGTCACTCCAGITATC | 136 |
| Starnosed_mole | | TGGGGAGCAAACAGGGACTAAGTCCAT | |

TABLE 4
Variants of human SERPINA1 enhancer (hSerpEnh) based on bioinformatic analyses

| | | | SEQ ID |
|---|---|---|---|
| Name | Description | SERPINA1 enhancer region sequence | NO: |
| hSerpEnh_100_ | hSerpEnh with modifications based on the | GGGGGAGGCTGCTGGTGAATATTAACCAAGATCACCCCA | 111 |
| vertebrate_consensus_ | consensus sequence from the UCSC 100- | GTTATCAGAGGAGCAAACAGGGACTAAGTCCAT | |
| v1 | vertebrate and 27-primate multiple alignments | | |
| | version 1 | | |
| hSerpEnh_100_ | HSerpEnh with modifications based on the | GGGGGAGGCTGCTGGTGAATATTAACCAAGGTCACCCCA | 112 |
| vertebrate_consensus_ | consensus sequence from the UCSC 100- | GTTACCAGAGGAGCAAACAGGGACTAAGTCCAT | |
| v2 | vertebrate and 27-primate multiple alignments | | |
| | version 2 | | |
| hSerpEnh_100_ | HSerpEnh with modifications based on the | GGGGGAGGCTGCTGGTGAATATTAACCAAGGTCACCCCA | 113 |
| vertebrate_consensus_ | consensus sequence from the UCSC 100- | GTTATCAGAGGAGCAAACAGGGACTAAGTTCAT | |
| v3 | vertebrate and 27-primate multiple alignments | | |
| | version 3 | | |
| hSerpEnh_100_ | HSerpEnh with modifications based on the | AGGGGAGGCTGCTGGTGAATATTAACCAAGGTCACCCCA | 114 |
| vertebrate_consensus_ | consensus sequence from the UCSC 100- | GTTATCAGAGGAGCAAACAGGGACTAAGTCCAT | |
| v4 | vertebrate and 27-primate multiple alignments | | |
| | version 4 | | |
| hSerpEnh_FOXA_ | HSerpEnh with FOXA consensus site version 1 | AGGGGAGGCTGCTGGTAAACATTAACCAAGGTCACCCCA | 86 |
| consensus_v1 | | GTTATCAGAGGAGCAAACAGGGGCTAAGTCCAC | |
| hSerpEnh_FOXA_ | HSerpEnh with FOXA consensus site version 2 | AGGGGAGGCTGCTGGTAAATATTAACCAAGGTCACCCCA | 87 |
| consensus_v2 | | GTTATCAGAGGAGCAAACAGGGGCTAAGTCCAT | |
| hSerpEnh_FOXA_ | HSerpEnh with FOXA & HNF4 consensus sites | GGGGGAGGCTGCTGGTAAACATTAACCAAGGTCACCCCA | 88 |
| HNF4_consensus_v1 | version 1 | GTTATCAGAGGAGCAAACAGGGGCAAAGTCCAC | |
| hSerpEnh_FOXA_ | HSerpEnh with FOXA & HNF4 consensus sites | AGGGGAGGCTGCTGGTAAATATTAACCAAGGTCACCCCA | 89 |
| HNF4_consensus_v2 | version 2 | GTTATCAGAGGAGCAAACAGGGGCAAAGTCCAC | |
| hSerpEnh_HNF1_ | HSerpEnh with HNF1 consensus site version 1 | AGGGGAGGCTGCTGGTTAATGATTAACTAAGGTCACCCC | 90 |
| consensus_v1 | | AGTTATCAGAGGAGCAAACAGGGGCTAAGTCCAC | |
| hSerpEnh_HNF1_ | HSerpEnh with HNF1 consensus site version 2 | AGGGGAGGCTGCTGGTTAATCATTAACTAAGGTCACCCC | 91 |
| consensus_v2 | | AGTTATCAGAGGAGCAAACAGGGGCTAAGTCCAC | |
| hSerpEnh_HNF1_ | HSerpEnh with HNF1 & HNF4 consensus sites | GGGGGAGGCTGCTGGTTAATGATTAACTAAGGTCACCCC | 92 |
| HNF4_consensus_v1 | version 1 | AGTTATCAGAGGAGCAAACAGGGGCAAAGTCCAC | |
| hSerpEnh_HNF1_ | HSerpEnh with HNF1 & HNF4 consensus sites | GGGGGAGGCTGCTGGTTAATCATTAACTAAGGTCACCCC | 93 |
| HNF4_consensus_v2 | version 2 | AGTTATCAGAGGAGCAAACAGGGGCAAAGTCCAC | |
| hSerpEnh_HNF4_ | HSerpEnh with HNF4 consensus site version 1 | AGGGGAGGCTGCTGGTGAATATTAACCAAGGTCACCCCA | 94 |
| consensus_v1 | | GTTATCAGAGGAGCAAACAGGGGCAAAGTCCAT | |
| hSerpEnh_HNF4_ | HSerpEnh with HNF4 consensus site version 2 | AGGGGAGGCTGCTGGTGAATATTAACCAAGGTCACCTCA | 95 |
| consensus_v2 | | GTTATCAGAGGAGCAAACAGGGGCAAAGTCCAC | |
| hSerpEnh_human_ | HSerpEnh with modifications based on non- | AGAGGAGGCTGCTGGTGAATATTAACTAAGGTCACCCCA | 96 |
| SNPs_v1 | disease associated human SNPs version 1 | GTTATCAGAGGAGCAAACAGGGGCTAAGTCCAC | |
| hSerpEnh_human_ | HSerpEnh with modifications based on non- | AGAGAAGGCTGCTGGTGAATATTAACTAAGGTCACCCCA | 97 |
| SNPS_v2 | disease associated human SNPs version 2 | GTTATCGGAGGAGCAAACAGGGGCTAAGTCCAC | |
| hSerpEnh_low_TFBS_ | HSerpEnh with modifications to end regions | GGGGGAGGCTGCTGGTGAATATTAACCAAGGTCAGCACA | 98 |
| and_end_regions_v1 | and regions with fewer predicted transcription | GTTATCAGAGGAGCAAACAGGGGCTAAGTCCAT | |
| | factor binding sites version 1 | | |
| hSerpEnh_low_TFBS_ | HSerpEnh with modifications to end regions | GGGGGAGGCTGCTGGTGAATATTAACCAAGGTCAACTCA | 99 |
| and_end_regions_v2 | and regions with fewer predicted transcription | GTTATCAGAGGAGCAAACAGGGGCTAAGTCCAT | |
| | factor binding sites version 2 | | |
| hSerpEnh_low_TFBS_ | HSerpEnh with modifications to end regions | AGGGGAGGCTGCTGGTGAATATTAACCAAGGTCACCTCA | 100 |
| and_end_regions_v3 | and regions with fewer predicted transcription | GTTATCAGAGGAGCAAACAGGGGCTAAGTCCAT | |
| | factor binding sites version 3 | | |
| hSerpEnh_low_TFBS_ | HSerpEnh with modifications to end regions | AGGGGAGGCTGCTGGTGAATATTAACCAAGGTCAGCCCA | 101 |
| and_end_regions_v4 | and regions with fewer predicted transcription | GTTATTGGAGGAGCAAACAGGGGCTAAGTCCAT | |
| | factor binding sites version 4 | | |
| hSerpEnh_low_TFBS_ | HSerpEnh with modifications to end regions | AGGGGAGGCTGCTGGTGAATATTAACCAAGGTCACCCCA | 102 |
| and_end_regions_v5 | and regions with fewer predicted transcription | GTTATTAGAGGAGCAAACAGGGGCTAAGTCCAT | |
| | factor binding sites v5 | | |
| hSerpEnh_low_TFBS_ | HSerpEnh with modifications to end regions | AGGGGAGGCTGCTGGTGAATATTAACCAAGGTCACCCCA | 103 |
| and_end_regions_v6 | and regions with fewer predicted transcription | GTTACTGGAGGAGCAAACAGGGGCTAAGTCCAT | |
| | factor binding sites v6 | | |
| hSerpEnh_low_TFBS_ | HSerpEnh with modifications to regions with | GGGGGAGGCTGCTGGTGAATATTAACCAAGGTCAGCACA | 104 |
| region_v1 | fewer predicted transcription factor binding | GTTACCAGAGGAGCAAACAGGGGCTAAGTCCAC | |
| | sites version 1 | | |
| hSerpEnh_low_TFBS_ | HSerpEnh with modifications to regions with | GGGGGAGGCTGCTGGTGAATATTAACCAAGGTCAACTCA | 105 |
| region_v2 | fewer predicted transcription factor binding | GTTACCAGAGGAGCAAACAGGGGCTAAGTCCAC | |
| | sites version 2 | | |
| hSerpEnh_low_TFBS_ | HSerpEnh with modifications to regions with | GGGGGAGGCTGCTGGTGAATATTAACCAAGGTCACCCCA | 106 |
| region_v3 | fewer predicted transcription factor binding | GTTACTAGGGGAGCAAACAGGGGCTAAGTCCAC | |
| | sites version 3 | | |
| hSerpEnh_low_TFBS_ | HSerpEnh with modifications to regions with | GGGGGAGGCTGCTGGTGAATATTAACCAAGGTCACCCCA | 107 |
| region_v4 | fewer predicted transcription factor binding | GTTACTAGAGGAACAAACAGGGGCTAAGTCCAC | |
| | sites version 4 | | |
| hSerpEnh_low_TFBS_ | HSerpEnh with modifications to regions with | GGGGGAGGCTGCTGGTGAATATTAACCAAGGTCACCCCA | 108 |
| region_v5 | fewer predicted transcription factor binding | GTTATTAGGGGAACAAACAGGGGCTAAGTCCAC | |
| | sites v5 | | |
| hSerpEnh_11_NHP_ | HSerpEnh with modifications based on the | GGGGGAGGCTGCTGGTGAATATTAACCAAGGTCACCCCA | 109 |
| consensus_v1 | Rhesus SERPINA1 enhancer sequence, which | GTTACCAGAGGAGCAAACAGGGACTAAGTTCAC | |
| | is shared with at least 10 other non-human | | |
| | primate version 1 | | |
| hSerpEnh_11_NHP_ | HSerpEnh with modifications based on the | GGGGGAGGCTGCTGGTGAATATTAACCAAGGTCACCCCA | 110 |
| consensus_v2 | Rhesus SERPINA1 enhancer sequence, which | GTTACCGGAGGAGCAAACAGGGACTAAGTTCAT | |
| | is shared with at least 10 other non-human | | |
| | primate version 2 | | |
| hSerpEnh_end_regions_ | HSerpEnh with modifications to end regions | AAGGGAGGCTGCTGGTGAATATTAACCAAGGTCACCCCA | 115 |
| v1 | version 1 | GTTATCGGAGGAGCAAACAGGGGCTAAGTTCAT | |
| hSerpEnh_end_regions_ | HSerpEnh with modifications to end regions | AAGGGAGGCTGCTGGTGAATATTAACCAAGGTCACCCCA | 116 |
| v2 | version 2 | GTTATCGGAGGAGCAAACAGGGACTAAGTCCAT | |

### Example 2: In Vitro Activity of Single Variants of Human SERPINA1 Enhancer

### Dual Luciferase Transient Transfection Assay

[0485] Promega ViaFect Transfection: Efficacy of enhancer variants were evaluated in vitro using luciferase reporter assays. Expression plasmids containing enhancer variants were transfected into HepG2 cells using Promega ViaFect Transfection. Briefly, 24 hr before beginning transfections, 25,000-30,000 HepG2 cells/well were seeded in 96-well collagen-I coated plates in 100 μL DMEM+10% FBS and incubated at 37C with 5% humidity. DNA master mixes for each experimental plasmid to be transfected were prepared. Transfections were performed in triplicate (3 wells/plasmid), unless otherwise noted. For each well to be transfected, 1 ng NanoLuc pNL1.1.TK[Nluc/TK] plasmid, 67 ng experimental firefly luciferase plasmid and 133 ng pGEM®-3Zf(−) carrier plasmid were mixed and brought to a volume of 9.2 μL with Opti-MEM. Next, 0.8 μL room temperature ViaFect per well was added to each DNA master mix and incubated 5-20 min at room temperature. Each well was transfected with 10 μL of ViaFect/Opti-MEM/NanoLuc mastermix and incubated at 37° C. with 5% humidity for 24 hr prior to performing luminescence assay. Benchmarking plasmids, 1× hSerpEnh-Firefly luciferase or 3× hSerpEnh-Firefly luciferase, were included on every plate.

[0486] Promega NanoGlo Dual Luciferase Assay: 24 hr post-transfection, media was replaced with 80 μL room temperature PBS to prevent phenol red from interfering with the assay. Plates were allowed to equilibrate to room temperature. ONE-Glo™ EX Reagent was prepared as follows: the contents of one bottle of ONE-Glo™ EX Luciferase Assay Buffer was transferred to one bottle of ONE-Glo™ EX Luciferase Assay Substrate and mixed by inversion until the substrate was thoroughly dissolved. 80 μL of ONE-Glo™ EX Reagent was added to each well. Samples were mixed by shaking on an orbital shaker for 3 min at 500 rpm. 140 μL of lysed cells was transferred to a white 96-well plate to minimize cross-talk between wells and absorption of the emitted light. Firefly luciferase luminescence was measured on a SpectraMax M5 plate reader. The NanoDLR™ Stop & GloR Substrate was diluted 1:100 into an appropriate volume of room-temperature NanoDLR™ Stop & GloR Buffer and mixed by inversion. 70 μL of NanoDLR™ Stop & GloR Reagent was added to each well, shaken for 3 min at 700 rpms and incubated for an additional 7 min. NanoLuc luminescence was measured on SpectraMax M5 plate reader.

Screening for Single Enhancer Variants that Outperforms the Human SERPINA1 Enhancer

[0487] In a first round of screening, 30 variants including 20 conserved sequences from other organisms and 10 TFBS consensus variants which were placed in a plasmid were tested in vitro using the luciferase reporter assay as described herein. Data from the top 11 constructs are shown in FIG. 4A. FIG. 4A depicts results of the top 11 constructs in a screen of 30 single (1×) variants using luciferase reporter assay (n=3). Results are grouped by rationally designed enhancer variants (1×TFBS Consensus Variants) or conserved SERPINA1 enhancer regions identified in other species (1× Conserved Genomic Variants). The human SERPINA1 enhancer is shown far left. Error bars represent standard deviation. As shown in FIG. 4A, in a plasmid, hSerpEnh_FOXA_HNF4_consensus_v1, performed almost 2 times better than the benchmark hSerpEnh.

[0488] FIG. 4B depicts the sequence design of the top variant in this screen, hSerpEnh_FOXA_HNF4_consensus_v1. The top variant was designed by modifying the FOXA and HNF4 motifs identified in the human SERPINA1 enhancer to match their respective consensus sequences (GTGAATA to GTAAACA for FOXA and CTAAGT to CAAACT for HNF4). The internal CpG was ablated by changing the G, which both has lower sequence conservation than the C and is at the position of a human SNP, to an A to match the SNP. The FOXA and HNF4 binding sites were modified to match the consensus.

### Example 3: In Vitro Activity of Multimerized Human SERPINA1 Enhancer Variants

[0489] Selected multimerized enhancer variants from Table 4 were screened using the luciferase reporter assay (described in Example 2) to identify variants with enhanced performance compared to the human SERPINA1 enhancer.

[0490] In a screen of 10 variants, the 1× version of hSerpEnh_FOXA_HNF4_consensus_v1 performed similarly to 3× hSerpEnh. The 3× version of hSerpEnh_FOXA_HNF4_consensus_v1 performed 1.6 times better than the 3× version of hSerpEnh and 3 times better than a single hSerpEnh (see FIG. 6). FIG. 5 depicts results of the screen of 10 multimerzied variants using a luciferase reporter assay (n=3). Results are grouped by 3× repeats of rationally designed enhancer variants (3× TFBS Variants), 3× repeats of conserved SERPINA1 enhancer regions identified in other species (3× Conserved Variant), 3× repeats of the human SERPINA1 enhancer separated by spacers of varying lengths and sequences (3× hSerpEnh Spacer Variants), and enhancers with varying numbers of repeats (#Repeat Variants). Results for the wild-type human SERPINA1 enhancer are shown in red. The comparison between the 3× human SERPINA1 enhancer variant and the 3× top performing variant is boxed. Two sets of technical triplicates were performed for the 1× and 3× human enhancers and the top performing 3× variant (r1, r2). Error bars represent standard deviation.

### Number of Enhancer Repeats and Length of Spacers

[0491] Like above, enhancers are often combined in series (multimerized/repeated enhancer sequences) to drive higher levels of transcription initiation. However, the principals underlying optimal number of repeats and orientation of enhancer regions are not well understood. Spacing between each iteration of repeated enhancers was hypothesized to be an attribute that impacts function, especially considering that DNA is a helix such that number of nucleotides between binding sites also changes their rotational spatial orientation. Spacers of different length between enhancers were tested. The length and sequence of spacers between SERPINA1 enhancer variant repeats were modified to screen for sequences that improved enhancer function. Spacers of length 2, 3, 5, 11, and 30 were designed to prevent introduction of CpGs or ATGs that may create cryptic translation start sites. 11 nt and 30 nt spacers that contain consensus FOXA and HNF4 binding sites were also designed and tested. (see, e.g., FIG. 6A).

[0492] A range of enhancer combinations for improved function, including various multimer enhancers and nucleotide spacer content, were tested in a dual luciferase transient transfection assay. Three main configurations as shown in FIG. 6B were tested: a single human Serpin enhancer (1× hSerpEnh), a 3× human Serpin enhancer (3× hSerpEnh) with spacers between the enhancer repeats and the transthyretin gene enhancer (TTRe) (3× hSerpEnh-TTRe), and multiple enhancers with spacers between enhancer repeats (e.g., 3×, 5× or 10× hSerpEnh). Variants with multiple enhancers for screening are shown in Table 4, above.

[0493] To determine the optimal number of repeats, HNF4_FOXA_v1, the top variant from the enhancer screen (FOXA_HNF4_consensus_v1), was placed in an array of 3, 5 or 10 repeats (e.g., 3× HNF4 FOXA v1; 5×HNF4 FOXA v1; and 10× HNF4 FOXA v1) to drive expression of FVIII from a plasmid. One dose of 50 ng plasmid containing FVIII ceDNA sequence was transfected into HepG2 cells. As shown in FIG. 7A, 7B, 3× and 5× variants performed better than HNF4 FOXA v1 variants repeated 10 times (10×) which did not exhibit a meaningful level of FVIII (see, e.g., FIG. 7C), suggesting that the Serpin enhancer exhibits superior performances when it is repeated in certain number, e.g., 3× to 5×, but not when it is repeated in an excessive number (e.g., 10×). A consistent observation was made with other Serpin Enhancer elements including, for example, that of bushbaby Serpin enhancer, Chinese tree shrew Serpin enhancer, and human Serpin enhancer (hSerpEnh)(FIG. 7D). The FVIII open reading frame (ORF) sequence used here was b-domain deleted codon optimized sequence as set forth in SEQ ID NO: 143 (hFVIII-F309S-BD226seq124-BDD-F309). Exemplary DNA constructs containing SEQ ID NO: 143 and enhancers/promoters of the present disclosure are shown in FIGS. 11 and 12.

[0494] Further, spacers having difference number of nucleotides and sequence were tested to determine whether these repeated enhancer elements are sensitive to their spatial orientation created by a spacer as well as characteristics of the spacer created by spacer sequences. The length and sequence of spacers between hSERPINA1 enhancer repeats were modified to screen for sequences that improved enhancer function. As shown in FIGS. 8A-E, the hSerpEnh elements were sensitive to length as well as sequences of the spancers placed. In plasmid-mediated FVIII expression in HepG2 cells,) two nucleotide spacers generally exhibited improved activity as compared to 3× human Serpin enhancer with a single nucleotide spacer (3× hSerpinEnh-TTRe with “C” spacer). A certain level of spacer-sequence driven dependency was also observed as the activity seen with constructs having the similar length of spacer exhibited widely expression different profile depending on the DNA sequence (see 11-mer in FIG. 8D). Surprisingly, one spacer having 11 nucleotides performed exceedingly better than other 11-mers or other length spacers like three nucleotide spacers (see FIG. 8B) or 5 nucleotide spacers (see FIG. 8C). This spacer (version 3) was one of variants of 11-mer spacers having the sequence of “TGCAAAGTCCT” (SEQ ID NO: 144) and/or “AGTGTTTACAA” (SEQ ID NO: 145) as shown in SEQ ID NO:71.

[0495] To determine whether Serpin enhancer variants (SerpEnhs derived from Bushbaby or Chinese Tree Shrew), plasmid FVIII constructs containing 3× Bushbaby SerpEnh having adenine (A) spacers or 3× Chinese Tree Shrew were injucted hydrodynamically into Rag 2 mice to drive expression of FVIII (HDI tail vein injection of 50 ng plasmid containing FVIII ceDNA sequence on day 0 with a single blood collection at day 7 for the measurement of FVIII activity). Surprisingly, the 3× Serpin A enhancer sequence derived from Bushbaby having a single nucleotide (adenine) as spacers exhibited increased FVIII expression (FIG. 9). Consistent with the observations above, 3× human Serpin enhancer sequence with 11 mer spacers also exhibited increased expression of FVIII as compared to 3× hSerpEhn (FIG. 9). It was also noted that 3× Chinese Tree Shrew enhancers that has 3 missing nucleotides in its 5′ end as compared to the human SerpEnh sequence (see FIG. 1) also exhibited an equivalent level of expression as compared to those of various 3× human serpin enhancer constructs (FIG. 9).

[0496] To determine whether the capacity of these enhancers could vary in a platform-dependent manner (e.g., plasmid v. closed-ended DNA), corresponding ceDNA vectors representative of the experimental results shown in FIGS. 7-9 were prepared and hydrodynamically injected into Rag2 mice as described above. FIG. 10 shows the result of FVIII expression from spacer variants of hSerpEnh (2mers and 11 mers) and Serpin enhancer variants (3× bushbaby Serpin enahancer and 3× Chinese tree shrew Serpin enhancer). Surprisingly, in the ceDNA platform, all of the SerpEnh variants tested (i.e., 3× Bushbaby SerpEnh variant, 3× Chinese Tree shrew SerpEnh variant, 11 mer spacer variants and 2mer spacer variants) exhibited equivalent or superior FVIII expression profiles as compared to that of 3× hSerpEnh, suggesting that these enhancers can be successfully implemented to drive expression of a therapeutic protein like FVIII in vivo.

[0497] The following nucleotide sequence is a ceDNA-plasmid sequence comprising a left ITR: spacer: bushbaby serpin enhancer (3× Bushbaby_Aspacers): TTRe (TTR enhancer): TTR liver-specific promoter: MVM intron: B-domain deleted FVIII: WPRE 3′UTR: bGH: spacer right ITR: right ITR. Detailed annotations for this construct are shown in FIG. 11.

(SEQ ID NO: 146)
AAAGTAGCCGAAGATGACGGTTTGTCACATGGAGTTGGCAGGATGTTTGATTAAAAACATAACAGGAA
GAAAAATGCCCCGCTGTGGGCGGACAAAATAGTTGGGAACTGGGAGGGGTGGAAATGGAGTTTTTAAG
GATTATTTAGGGAAGAGTGACAAAATAGATGGGAACTGGGTGTAGCGTCGTAAGCTAATACGAAAATT
AAAAATGACAAAATAGTTTGGAACTAGATTTCACTTATCTGGTTCGGATCTCCTAGGCCTGCAGGCAG
CTGCGCGCTCGCTCGCTCACTGAGGCCGCCCGGGCAAAGCCCGGGCGTCGGGCGACCTTTGGTCGCCC
GGCCTCAGTGAGCGAGCGAGCGCGCAGAGAGGGAGTGGCCAACTCCATCACTAGGGGTTCCTTGTAGT
TAATGATTAACCCGCCATGCTACTTATCGCGGCCGCAGGGGAAGCTACTGGTGAATATTAACCAAGGT
CACCCAGTTATCAGGGAGCAAACAGGAGCTAAGTCCATAGGGGGAAGCTACTGGTGAATATTAACCAA
GGTCACCCAGTTATCAGGGAGCAAACAGGAGCTAAGTCCATAGGGGGAAGCTACTGGTGAATATTAAC
CAAGGTCACCCAGTTATCAGGGAGCAAACAGGAGCTAAGTCCATGGTACCCACTGGGAGGATGTTGAG
TAAGATGGAAAACTACTGATGACCCTTGCAGAGACAGAGTATTAGGACATGTTTGAACAGGGGCCGGG
CGATCAGCAGGTAGCTCTAGAGGATCCCCGTCTGTCTGCACATTTCGTAGAGCGAGTGTTCCGATACT
CTAATCTCCCTAGGCAAGGTTCATATTTGTGTAGGTTACTTATTCTCCTTTTGTTGACTAAGTCAATA
ATCAGAATCAGCAGGTTTGGAGTCAGCTTGGCAGGGATCAGCAGCCTGGGTTGGAAGGAGGGGGTATA
AAAGCCCCTTCACCAGGAGAAGCCGTCACACAGATCCACAAGCTCCTGAAGAGGTAAGGGTTTAAGGG
ATGGTTGGTTGGTGGGGTATTAATGTTTAATTACCTGGAGCACCTGCCTGAAATCACTTTTTTTCAGG
TTGGTTTAAACGCCGCCACCATGCAGATTGAGCTGAGCACCTGCTTCTTCCTGTGCCTGCTGAGGTTC
TGCTTCTCTGCCACCAGGAGATACTACCTGGGGGCTGTGGAGCTGAGCTGGGACTACATGCAGTCTGA
CCTGGGGGAGCTGCCTGTGGATGCCAGGTTCCCCCCCAGAGTGCCCAAGAGCTTCCCCTTCAACACCT
CTGTGGTGTACAAGAAGACCCTGTTTGTGGAGTTCACTGACCACCTGTTCAACATTGCCAAGCCCAGG
CCCCCCTGGATGGGCCTGCTGGGCCCCACCATCCAGGCTGAGGTGTATGACACTGTGGTGATCACCCT
GAAGAACATGGCCAGCCACCCTGTGAGCCTGCATGCTGTGGGGGTGAGCTACTGGAAGGCCTCTGAGG
GGGCTGAGTATGATGACCAGACCAGCCAGAGGGAGAAGGAGGATGACAAGGTGTTCCCTGGGGGCAGC
CACACCTATGTGTGGCAGGTGCTGAAGGAGAATGGCCCCATGGCCTCTGACCCCCTGTGCCTGACCTA
CAGCTACCTGAGCCATGTGGACCTGGTGAAGGACCTGAACTCTGGCCTGATTGGGGCCCTGCTGGTGT
GCAGGGAGGGCAGCCTGGCCAAGGAGAAGACCCAGACCCTGCACAAGTTCATCCTGCTGTTTGCTGTG
TTTGATGAGGGCAAGAGCTGGCACTCTGAAACCAAGAACAGCCTGATGCAGGACAGGGATGCTGCCTC
TGCCAGGGCCTGGCCCAAGATGCACACTGTGAATGGCTATGTGAACAGGAGCCTGCCTGGCCTGATTG
GCTGCCACAGGAAGTCTGTGTACTGGCATGTGATTGGCATGGGCACCACCCCTGAGGTGCACAGCATC
TTCCTGGAGGGCCACACCTTCCTGGTCAGGAACCACAGGCAGGCCAGCCTGGAGATCAGCCCCATCAC
CTTCCTGACTGCCCAGACCCTGCTGATGGACCTGGGCCAGTTCCTGCTGTTCTGCCACATCAGCAGCC
ACCAGCATGATGGCATGGAGGCCTATGTGAAGGTGGACAGCTGCCCTGAGGAGCCCCAGCTGAGGATG
AAGAACAATGAGGAGGCTGAGGACTATGATGATGACCTGACTGACTCTGAGATGGATGTGGTGAGGTT
TGATGATGACAACAGCCCCAGCTTCATCCAGATCAGGTCTGTGGCCAAGAAGCACCCCAAGACCTGGG
TGCACTACATTGCTGCTGAGGAGGAGGACTGGGACTATGCCCCCCTGGTGCTGGCCCCTGATGACAGG
AGCTACAAGAGCCAGTACCTGAACAATGGCCCCCAGAGGATTGGCAGGAAGTACAAGAAGGTCAGGTT
CATGGCCTACACTGATGAAACCTTCAAGACCAGGGAGGCCATCCAGCATGAGTCTGGCATCCTGGGCC
CCCTGCTGTATGGGGAGGTGGGGGACACCCTGCTGATCATCTTCAAGAACCAGGCCAGCAGGCCCTAC
AACATCTACCCCCATGGCATCACTGATGTGAGGCCCCTGTACAGCAGGAGGCTGCCCAAGGGGGTGAA
GCACCTGAAGGACTTCCCCATCCTGCCTGGGGAGATCTTCAAGTACAAGTGGACTGTGACTGTGGAGG
ATGGCCCCACCAAGTCTGACCCCAGGTGCCTGACCAGATACTACAGCAGCTTTGTGAACATGGAGAGG
GACCTGGCCTCTGGCCTGATTGGCCCCCTGCTGATCTGCTACAAGGAGTCTGTGGACCAGAGGGGCAA
CCAGATCATGTCTGACAAGAGGAATGTGATCCTGTTCTCTGTGTTTGATGAGAACAGGAGCTGGTACC
TGACTGAGAACATCCAGAGGTTCCTGCCCAACCCTGCTGGGGTGCAGCTGGAGGACCCTGAGTTCCAG
GCCAGCAACATCATGCACAGCATCAATGGCTATGTGTTTGACAGCCTGCAGCTGTCTGTGTGCCTGCA
TGAGGTGGCCTACTGGTACATCCTGAGCATTGGGGCCCAGACTGACTTCCTGTCTGTGTTCTTCTCTG
GCTACACCTTCAAGCACAAGATGGTGTATGAGGACACCCTGACCCTGTTCCCCTTCTCTGGGGAGACT
GTGTTCATGAGCATGGAGAACCCTGGCCTGTGGATTCTGGGCTGCCACAACTCTGACTTCAGGAACAG
GGGCATGACTGCCCTGCTGAAAGTCTCCAGCTGTGACAAGAACACTGGGGACTACTATGAGGACAGCT
ATGAGGACATCTCTGCCTACCTGCTGAGCAAGAACAATGCCATTGAGCCCAGGAGCTTCAGCCAGAAT
AGCAGGCACCCCAGCACCAGGCAGAAGCAGTTCAATGCCACCACCATCCCAGAGAATACCACCCTGCA
GTCTGACCAGGAGGAGATTGACTATGATGACACCATCTCTGTGGAGATGAAGAAGGAGGACTTTGACA
TCTACGACGAGGACGAGAACCAGAGCCCCAGGAGCTTCCAGAAGAAGACCAGGCACTACTTCATTGCT
GCTGTGGAGAGGCTGTGGGACTATGGCATGAGCAGCAGCCCCCATGTGCTGAGGAACAGGGCCCAGTC
TGGCTCTGTGCCCCAGTTCAAGAAGGTGGTGTTCCAGGAGTTCACTGATGGCAGCTTCACCCAGCCCC
TGTACAGAGGGGAGCTGAATGAGCACCTGGGCCTGCTGGGCCCCTACATCAGGGCTGAGGTGGAGGAC
AACATCATGGTGACCTTCAGGAACCAGGCCAGCAGGCCCTACAGCTTCTACAGCAGCCTGATCAGCTA
TGAGGAGGACCAGAGGCAGGGGGCTGAGCCCAGGAAGAACTTTGTGAAGCCCAATGAAACCAAGACCT
ACTTCTGGAAGGTGCAGCACCACATGGCCCCCACCAAGGATGAGTTTGACTGCAAGGCCTGGGCCTAC
TTCTCTGATGTGGACCTGGAGAAGGATGTGCACTCTGGCCTGATTGGCCCCCTGCTGGTGTGCCACAC
CAACACCCTGAACCCTGCCCATGGCAGGCAGGTGACTGTGCAGGAGTTTGCCCTGTTCTTCACCATCT
TTGATGAAACCAAGAGCTGGTACTTCACTGAGAACATGGAGAGGAACTGCAGGGCCCCCTGCAACATC
CAGATGGAGGACCCCACCTTCAAGGAGAACTACAGGTTCCATGCCATCAATGGCTACATCATGGACAC
CCTGCCTGGCCTGGTGATGGCCCAGGACCAGAGGATCAGGTGGTACCTGCTGAGCATGGGCAGCAATG
AGAACATCCACAGCATCCACTTCTCTGGCCATGTGTTCACTGTGAGGAAGAAGGAGGAGTACAAGATG
GCCCTGTACAACCTGTACCCTGGGGTGTTTGAGACTGTGGAGATGCTGCCCAGCAAGGCTGGCATCTG
GAGGGTGGAGTGCCTGATTGGGGAGCACCTGCATGCTGGCATGAGCACCCTGTTCCTGGTGTACAGCA
ACAAGTGCCAGACCCCCCTGGGCATGGCCTCTGGCCACATCAGGGACTTCCAGATCACTGCCTCTGGC
CAGTATGGCCAGTGGGCCCCCAAGCTGGCCAGGCTGCACTACTCTGGCAGCATCAATGCCTGGAGCAC
CAAGGAGCCCTTCAGCTGGATCAAGGTGGACCTGCTGGCCCCCATGATCATCCATGGCATCAAGACCC
AGGGGGCCAGGCAGAAGTTCAGCAGCCTGTACATCAGCCAGTTCATCATCATGTACAGCCTGGATGGC
AAGAAGTGGCAGACCTACAGGGGCAACAGCACTGGCACCCTGATGGTGTTCTTTGGCAATGTGGACAG
CTCTGGCATCAAGCACAACATCTTCAACCCCCCCATCATTGCCAGATACATCAGGCTGCACCCCACCC
ACTACAGCATCAGGAGCACCCTGAGGATGGAGCTGATGGGCTGTGACCTGAACAGCTGCAGCATGCCC
CTGGGCATGGAGAGCAAGGCCATCTCTGATGCCCAGATCACTGCCAGCAGCTACTTCACCAACATGTT
TGCCACCTGGAGCCCCAGCAAGGCCAGGCTGCACCTGCAGGGCAGGAGCAATGCCTGGAGGCCCCAGG
TCAACAACCCCAAGGAGTGGCTGCAGGTGGACTTCCAGAAGACCATGAAGGTGACTGGGGTGACCACC
CAGGGGGTGAAGAGCCTGCTGACCAGCATGTATGTGAAGGAGTTCCTGATCAGCAGCAGCCAGGATGG
CCACCAGTGGACCCTGTTCTTCCAGAATGGCAAGGTGAAGGTGTTCCAGGGCAACCAGGACAGCTTCA
CCCCTGTGGTGAACAGCCTGGACCCCCCCCTGCTGACCAGATACCTGAGGATTCACCCCCAGAGCTGG
GTGCACCAGATTGCCCTGAGGATGGAGGTGCTGGGCTGTGAGGCCCAGGACCTGTACTGATTAATTAA
GAGCATCTTACCGCCATTTATTCCCATATTTGTTCTGTTTTTCTTGATTTGGGTATACATTTAAATGT
TAATAAAACAAAATGGTGGGGCAATCATTTACATTTTTAGGGATATGTAATTACTAGTTCAGGTGTAT
TGCCACAAGACAAACATGTTAAGAAACTTTCCCGTTATTTACGCTCTGTTCCTGTTAATCAACCTCTG
GATTACAAAATTTGTGAAAGATTGACTGATATTCTTAACTATGTTGCTCCTTTTACGCTGTGTGGATA
TGCTGCTTTATAGCCTCTGTATCTAGCTATTGCTTCCCGTACGGCTTTCGTTTTCTCCTCCTTGTATA
AATCCTGGTTGCTGTCTCTTTTAGAGGAGTTGTGGCCCGTTGTCCGTCAACGTGGCGTGGTGTGCTCT
GTGTTTGCTGACGCAACCCCCACTGGCTGGGGCATTGCCACCACCTGTCAACTCCTTTCTGGGACTTT
CGCTTTCCCCCTCCCGATCGCCACGGCAGAACTCATCGCCGCCTGCCTTGCCCGCTGCTGGACAGGGG
CTAGGTTGCTGGGCACTGATAATTCCGTGGTGTTGTCTGTGCCTTCTAGTTGCCAGCCATCTGTTGTT
TGCCCCTCCCCCGTGCCTTCCTTGACCCTGGAAGGTGCCACTCCCACTGTCCTTTCCTAATAAAATGA
GGAAATTGCATCGCATTGTCTGAGTAGGTGTCATTCTATTCTGGGGGGTGGGGTGGGGCAGGACAGCA
AGGGGGAGGATTGGGAAGACAATAGCAGGCATGCTGGGGATGCGGTGGGCTCTATGGCTCTAGAGCAT
GGCTACGTAGATAAGTAGCATGGCGGGTTAATCATTAACTACACCTGCAGGAGGAACCCCTAGTGATG
GAGTTGGCCACTCCCTCTCTGCGCGCTCGCTCGCTCACTGAGGCCGGGCGACCAAAGGTCGCCCGACG
CCCGGGCGGCCTCAGTGAGCGAGCGAGCGCGCAGCTGCCTGCAGGGGCGCGCCTCGAGCCATGGTGCT
AGCAGCTGATGCATAGCATGCGGTACCGGGAGATGGGGGAGGCTAACTGAAACACGGAAGGAGACAAT
ACCGGAAGGAACCCGCGCTATGACGGCAATAAAAAGACAGAATAAAACGCACGGGTGTTGGGTCGTTT
GTTCATAAACGCGGGGTTCGGTCCCAGGGCTGGCACTCTGTCGATACCCCACCGAGACCCCATTGGGA
CCAATACGCCCGCGTTTCTTCCTTTTCCCCACCCCAACCCCCAAGTTCGGGTGAAGGCCCAGGGCTCG
CAGCCAACGTCGGGGCGGCAAGCCCTGCCATAGCCACTACGGGTACGTAGGCCAACCACTAGAACTAT
AGCTAGAGTCCTGGGCGAACAAACGATGCTCGCCTTCCAGAAAACCGAGGATGCGAACCACTTCATCC
GGGGTCAGCACCACCGGCAAGCGCCGCGACGGCCGAGGTCTACCGATCTCCTGAAGCCAGGGCAGATC
CGTGCACAGCACCTTGCCGTAGAAGAACAGCAAGGCCGCCAATGCCTGACGATGCGTGGAGACCGAAA
CCTTGCGCTCGTTCGCCAGCCAGGACAGAAATGCCTCGACTTCGCTGCTGCCCAAGGTTGCCGGGTGA
CGCACACCGTGGAAACGGATGAAGGCACGAACCCAGTTGACATAAGCCTGTTCGGTTCGTAAACTGTA
ATGCAAGTAGCGTATGCGCTCACGCAACTGGTCCAGAACCTTGACCGAACGCAGCGGTGGTAACGGCG
CAGTGGCGGTTTTCATGGCTTGTTATGACTGTTTTTTTGTACAGTCTATGCCTCGGGCATCCAAGCAG
CAAGCGCGTTACGCCGTGGGTCGATGTTTGATGTTATGGAGCAGCAACGATGTTACGCAGCAGCAACG
ATGTTACGCAGCAGGGCAGTCGCCCTAAAACAAAGTTAGGTGGCTCAAGTATGGGCATCATTCGCACA
TGTAGGCTCGGCCCTGACCAAGTCAAATCCATGCGGGCTGCTCTTGATCTTTTCGGTCGTGAGTTCGG
AGACGTAGCCACCTACTCCCAACATCAGCCGGACTCCGATTACCTCGGGAACTTGCTCCGTAGTAAGA
CATTCATCGCGCTTGCTGCCTTCGACCAAGAAGCGGTTGTTGGCGCTCTCGCGGCTTACGTTCTGCCC
AGGTTTGAGCAGCCGCGTAGTGAGATCTATATCTATGATCTCGCAGTCTCCGGCGAGCACCGGAGGCA
GGGCATTGCCACCGCGCTCATCAATCTCCTCAAGCATGAGGCCAACGCGCTTGGTGCTTATGTGATCT
ACGTGCAAGCAGATTACGGTGACGATCCCGCAGTGGCTCTCTATACAAAGTTGGGCATACGGGAAGAA
GTGATGCACTTTGATATCGACCCAAGTACCGCCACCTAACAATTCGTTCAAGCCGAGATCGGCTTCCC
GGCCGCGGAGTTGTTCGGTAAATTGTCACAACGCCGCGAATATAGTCTTTACCATGCCCTTGGCCACG
CCCCTCTTTAATACGACGGGCAATTTGCACTTCAGAAAATGAAGAGTTTGCTTTAGCCATAACAAAAG
TCCAGTATGCTTTTTCACAGCATAACTGGACTGATTTCAGTTTACAACTATTCTGTCTAGTTTAAGAC
TTTATTGTCATAGTTTAGATCTATTTTGTTCAGTTTAAGACTTTATTGTCCGCCCACACCCGCTTACG
CAGGGCATCCATTTATTACTCAACCGTAACCGATTTTGCCAGGTTACGCGGCTGGTCTGCGGTGTGAA
ATACCGCACAGATGCGTAAGGAGAAAATACCGCATCAGGCGCTCTTCCGCTTCCTCGCTCACTGACTC
GCTGCGCTCGGTCGTTCGGCTGCGGCGAGCGGTATCAGCTCACTCAAAGGCGGTAATACGGTTATCCA
CAGAATCAGGGGATAACGCAGGAAAGAACATGTGAGCAAAAGGCCAGCAAAAGGCCAGGAACCGTAAA
AAGGCCGCGTTGCTGGCGTTTTTCCATAGGCTCCGCCCCCCTGACGAGCATCACAAAAATCGACGCTC
AAGTCAGAGGTGGCGAAACCCGACAGGACTATAAAGATACCAGGCGTTTCCCCCTGGAAGCTCCCTCG
TGCGCTCTCCTGTTCCGACCCTGCCGCTTACCGGATACCTGTCCGCCTTTCTCCCTTCGGGAAGCGTG
GCGCTTTCTCAATGCTCACGCTGTAGGTATCTCAGTTCGGTGTAGGTCGTTCGCTCCAAGCTGGGCTG
TGTGCACGAACCCCCCGTTCAGCCCGACCGCTGCGCCTTATCCGGTAACTATCGTCTTGAGTCCAACC
CGGTAAGACACGACTTATCGCCACTGGCAGCAGCCACTGGTAACAGGATTAGCAGAGCGAGGTATGTA
GGCGGTGCTACAGAGTTCTTGAAGTGGTGGCCTAACTACGGCTACACTAGAAGGACAGTATTTGGTAT
CTGCGCTCTGCTGAAGCCAGTTACCTTCGGAAAAAGAGTTGGTAGCTCTTGATCCGGCAAACAAACCA
CCGCTGGTAGCGGTGGTTTTTTTGTTTGCAAGCAGCAGATTACGCGCAGAAAAAAAGGATCTCAAGAA
GATCCTTTGATCTTTTCTACGGGGTCTGACGCTCAGTGGAACGAAAACTCACGTTAAGGGATTTTGGT
CATGAGATTATCAAAAAGGATCTTCACCTAGATCCTTTTAAATTAAAAATGAAGTTTTAAATCAATCT
AAAGTATATATGAGTAAACTTGGTCTGACAGTTACCAATGCTTAATCAGTGAGGCACCTATCTCAGCG
ATCTGTCTATTTCGTTCATCCATAGTTGCCTGACTCCCCGTCGTGTAGATAACTACGATACGGGAGGG
CTTACCATCTGGCCCCAGTGCTGCAATGATACCGCGAGACCCACGCTCACCGGCTCCAGATTTATCAG
CAATAAACCAGCCAGCCGGAAGGGCCGAGCGCAGAAGTGGTCCTGCAACTTTATCCGCCTCCATCCAG
TCTATTAATTGTTGCCGGGAAGCTAGAGTAAGTAGTTCGCCAGTTAATAGTTTGCGCAACGTTGTTGC
CATTGCTACAGGCATCGTGGTGTCACGCTCGTCGTTTGGTATGGCTTCATTCAGCTCCGGTTCCCAAC
GATCAAGGCGAGTTACATGATCCCCCATGTTGTGCAAAAAAGCGGTTAGCTCCTTCGGTCCTCCGATC
GTTGTCAGAAGTAAGTTGGCCGCAGTGTTATCACTCATGGTTATGGCAGCACTGCATAATTCTCTTAC
TGTCATGCCATCCGTAAGATGCTTTTCTGTGACTGGTGAGTACTCAACCAAGTCATTCTGAGAATAGT
GTATGCGGCGACCGAGTTGCTCTTGCCCGGCGTCAATACGGGATAATACCGCGCCACATAGCAGAACT
TTAAAAGTGCTCATCATTGGAAAACGTTCTTCGGGGCGAAAACTCTCAAGGATCTTACCGCTGTTGAG
ATCCAGTTCGATGTAACCCACTCGTGCACCCAACTGATCTTCAGCATCTTTTACTTTCACCAGCGTTT
CTGGGTGAGCAAAAACAGGAAGGCAAAATGCCGCAAAAAAGGGAATAAGGGCGACACGGAAATGTTGA
ATACTCATACTCTTCCTTTTTCAATATTATTGAAGCATTTATCAGGGTTATTGTCTCATGAGCGGATA
CATATTTGAATGTATTTAGAAAAATAAACAAATAGGGGTTCCGCGCACATTTCCCCGAAAAGTGCCAC
CTGAAATTGTAAACGTTAATATTTTGTTAAAATTCGCGTTAAATTTTTGTTAAATCAGCTCATTTTTT
AACCAATAGGCCGAAATCGGCAAAATCCCTTATAAATCAAAAGAATAGACCGAGATAGGGTTGAGTGT
TGTTCCAGTTTGGAACAAGAGTCCACTATTAAAGAACGTGGACTCCAACGTCAAAGGGCGAAAAACCG
TCTATCAGGGCGATGGCCCACTACGTGAACCATCACCCTAATCAAGTTTTTTGGGGTCGAGGTGCCGT
AAAGCACTAAATCGGAACCCTAAAGGGAGCCCCCGATTTAGAGCTTGACGGGGAAAGCCGGCGAACGT
GGCGAGAAAGGAAGGGAAGAAAGCGAAAGGAGCGGGCGCTAGGGCGCTGGCAAGTGTAGCGGTCACGC
TGCGCGTAACCACCACACCCGCCGCGCTTAATGCGCCGCTACAGGGCGCGTCCCATTCGCCATTCAGG
CTGCAAATAAGCGTTGATATTCAGTCAATTACAAACATTAATAACGAAGAGATGACAGAAAAATTTTC
ATTCTGTGACAGAGAA

[0498] The following nucleotide sequence is a ceDNA-plasmid sequence comprising a left ITR: spacer: 3× hSerpEnh: TTRe (TTR enhancer): TTR liver-specific promoter: MVM intron: B-domain deleted FVIII: WPRE 3′UTR: bGH: spacer right ITR: right ITR. Detailed annotations for this ceDNA vector are shown in FIG. 12.

(SEQ ID NO: 147)
CCTGCAGGCAGCTGCGCGCTCGCTCGCTCACTGAGGCCGCCCGGGCAAAGCCCGGGCGTCGGGCGACC
TTTGGTCGCCCGGCCTCAGTGAGCGAGCGAGCGCGCAGAGAGGGAGTGGCCAACTCCATCACTAGGGG
TTCCTTGTAGTTAATGATTAACCCGCCATGCTACTTATCGCGGCCGCGGGGGAGGCTGCTGGTGAATA
TTAACCAAGGTCACCCCAGTTATCGGAGGAGCAAACAGGGGCTAAGTCCACCGGGGGAGGCTGCTGGT
GAATATTAACCAAGGTCACCCCAGTTATCGGAGGAGCAAACAGGGGCTAAGTCCACCGGGGGAGGCTG
CTGGTGAATATTAACCAAGGTCACCCCAGTTATCGGAGGAGCAAACAGGGGCTAAGTCCACGGTACCC
ACTGGGAGGATGTTGAGTAAGATGGAAAACTACTGATGACCCTTGCAGAGACAGAGTATTAGGACATG
TTTGAACAGGGGCCGGGCGATCAGCAGGTAGCTCTAGAGGATCCCCGTCTGTCTGCACATTTCGTAGA
GCGAGTGTTCCGATACTCTAATCTCCCTAGGCAAGGTTCATATTTGTGTAGGTTACTTATTCTCCTTT
TGTTGACTAAGTCAATAATCAGAATCAGCAGGTTTGGAGTCAGCTTGGCAGGGATCAGCAGCCTGGGT
TGGAAGGAGGGGGTATAAAAGCCCCTTCACCAGGAGAAGCCGTCACACAGATCCACAAGCTCCTGAAG
AGGTAAGGGTTTAAGGGATGGTTGGTTGGTGGGGTATTAATGTTTAATTACCTGGAGCACCTGCCTGA
AATCACTTTTTTTCAGGTTGGTTTAAACGCCGCCACCATGCAGATTGAGCTGAGCACCTGCTTCTTCC
TGTGCCTGCTGAGGTTCTGCTTCTCTGCCACCAGGAGATACTACCTGGGGGCTGTGGAGCTGAGCTGG
GACTACATGCAGTCTGACCTGGGGGAGCTGCCTGTGGATGCCAGGTTCCCCCCCAGAGTGCCCAAGAG
CTTCCCCTTCAACACCTCTGTGGTGTACAAGAAGACCCTGTTTGTGGAGTTCACTGACCACCTGTTCA
ACATTGCCAAGCCCAGGCCCCCCTGGATGGGCCTGCTGGGCCCCACCATCCAGGCTGAGGTGTATGAC
ACTGTGGTGATCACCCTGAAGAACATGGCCAGCCACCCTGTGAGCCTGCATGCTGTGGGGGTGAGCTA
CTGGAAGGCCTCTGAGGGGGCTGAGTATGATGACCAGACCAGCCAGAGGGAGAAGGAGGATGACAAGG
TGTTCCCTGGGGGCAGCCACACCTATGTGTGGCAGGTGCTGAAGGAGAATGGCCCCATGGCCTCTGAC
CCCCTGTGCCTGACCTACAGCTACCTGAGCCATGTGGACCTGGTGAAGGACCTGAACTCTGGCCTGAT
TGGGGCCCTGCTGGTGTGCAGGGAGGGCAGCCTGGCCAAGGAGAAGACCCAGACCCTGCACAAGTTCA
TCCTGCTGTTTGCTGTGTTTGATGAGGGCAAGAGCTGGCACTCTGAAACCAAGAACAGCCTGATGCAG
GACAGGGATGCTGCCTCTGCCAGGGCCTGGCCCAAGATGCACACTGTGAATGGCTATGTGAACAGGAG
CCTGCCTGGCCTGATTGGCTGCCACAGGAAGTCTGTGTACTGGCATGTGATTGGCATGGGCACCACCC
CTGAGGTGCACAGCATCTTCCTGGAGGGCCACACCTTCCTGGTCAGGAACCACAGGCAGGCCAGCCTG
GAGATCAGCCCCATCACCTTCCTGACTGCCCAGACCCTGCTGATGGACCTGGGCCAGTTCCTGCTGTT
CTGCCACATCAGCAGCCACCAGCATGATGGCATGGAGGCCTATGTGAAGGTGGACAGCTGCCCTGAGG
AGCCCCAGCTGAGGATGAAGAACAATGAGGAGGCTGAGGACTATGATGATGACCTGACTGACTCTGAG
ATGGATGTGGTGAGGTTTGATGATGACAACAGCCCCAGCTTCATCCAGATCAGGTCTGTGGCCAAGAA
GCACCCCAAGACCTGGGTGCACTACATTGCTGCTGAGGAGGAGGACTGGGACTATGCCCCCCTGGTGC
TGGCCCCTGATGACAGGAGCTACAAGAGCCAGTACCTGAACAATGGCCCCCAGAGGATTGGCAGGAAG
TACAAGAAGGTCAGGTTCATGGCCTACACTGATGAAACCTTCAAGACCAGGGAGGCCATCCAGCATGA
GTCTGGCATCCTGGGCCCCCTGCTGTATGGGGAGGTGGGGGACACCCTGCTGATCATCTTCAAGAACC
AGGCCAGCAGGCCCTACAACATCTACCCCCATGGCATCACTGATGTGAGGCCCCTGTACAGCAGGAGG
CTGCCCAAGGGGGTGAAGCACCTGAAGGACTTCCCCATCCTGCCTGGGGAGATCTTCAAGTACAAGTG
GACTGTGACTGTGGAGGATGGCCCCACCAAGTCTGACCCCAGGTGCCTGACCAGATACTACAGCAGCT
TTGTGAACATGGAGAGGGACCTGGCCTCTGGCCTGATTGGCCCCCTGCTGATCTGCTACAAGGAGTCT
GTGGACCAGAGGGGCAACCAGATCATGTCTGACAAGAGGAATGTGATCCTGTTCTCTGTGTTTGATGA
GAACAGGAGCTGGTACCTGACTGAGAACATCCAGAGGTTCCTGCCCAACCCTGCTGGGGTGCAGCTGG
AGGACCCTGAGTTCCAGGCCAGCAACATCATGCACAGCATCAATGGCTATGTGTTTGACAGCCTGCAG
CTGTCTGTGTGCCTGCATGAGGTGGCCTACTGGTACATCCTGAGCATTGGGGCCCAGACTGACTTCCT
GTCTGTGTTCTTCTCTGGCTACACCTTCAAGCACAAGATGGTGTATGAGGACACCCTGACCCTGTTCC
CCTTCTCTGGGGAGACTGTGTTCATGAGCATGGAGAACCCTGGCCTGTGGATTCTGGGCTGCCACAAC
TCTGACTTCAGGAACAGGGGCATGACTGCCCTGCTGAAAGTCTCCAGCTGTGACAAGAACACTGGGGA
CTACTATGAGGACAGCTATGAGGACATCTCTGCCTACCTGCTGAGCAAGAACAATGCCATTGAGCCCA
GGAGCTTCAGCCAGAATAGCAGGCACCCCAGCACCAGGCAGAAGCAGTTCAATGCCACCACCATCCCA
GAGAATACCACCCTGCAGTCTGACCAGGAGGAGATTGACTATGATGACACCATCTCTGTGGAGATGAA
GAAGGAGGACTTTGACATCTACGACGAGGACGAGAACCAGAGCCCCAGGAGCTTCCAGAAGAAGACCA
GGCACTACTTCATTGCTGCTGTGGAGAGGCTGTGGGACTATGGCATGAGCAGCAGCCCCCATGTGCTG
AGGAACAGGGCCCAGTCTGGCTCTGTGCCCCAGTTCAAGAAGGTGGTGTTCCAGGAGTTCACTGATGG
CAGCTTCACCCAGCCCCTGTACAGAGGGGAGCTGAATGAGCACCTGGGCCTGCTGGGCCCCTACATCA
GGGCTGAGGTGGAGGACAACATCATGGTGACCTTCAGGAACCAGGCCAGCAGGCCCTACAGCTTCTAC
AGCAGCCTGATCAGCTATGAGGAGGACCAGAGGCAGGGGGCTGAGCCCAGGAAGAACTTTGTGAAGCC
CAATGAAACCAAGACCTACTTCTGGAAGGTGCAGCACCACATGGCCCCCACCAAGGATGAGTTTGACT
GCAAGGCCTGGGCCTACTTCTCTGATGTGGACCTGGAGAAGGATGTGCACTCTGGCCTGATTGGCCCC
CTGCTGGTGTGCCACACCAACACCCTGAACCCTGCCCATGGCAGGCAGGTGACTGTGCAGGAGTTTGC
CCTGTTCTTCACCATCTTTGATGAAACCAAGAGCTGGTACTTCACTGAGAACATGGAGAGGAACTGCA
GGGCCCCCTGCAACATCCAGATGGAGGACCCCACCTTCAAGGAGAACTACAGGTTCCATGCCATCAAT
GGCTACATCATGGACACCCTGCCTGGCCTGGTGATGGCCCAGGACCAGAGGATCAGGTGGTACCTGCT
GAGCATGGGCAGCAATGAGAACATCCACAGCATCCACTTCTCTGGCCATGTGTTCACTGTGAGGAAGA
AGGAGGAGTACAAGATGGCCCTGTACAACCTGTACCCTGGGGTGTTTGAGACTGTGGAGATGCTGCCC
AGCAAGGCTGGCATCTGGAGGGTGGAGTGCCTGATTGGGGAGCACCTGCATGCTGGCATGAGCACCCT
GTTCCTGGTGTACAGCAACAAGTGCCAGACCCCCCTGGGCATGGCCTCTGGCCACATCAGGGACTTCC
AGATCACTGCCTCTGGCCAGTATGGCCAGTGGGCCCCCAAGCTGGCCAGGCTGCACTACTCTGGCAGC
ATCAATGCCTGGAGCACCAAGGAGCCCTTCAGCTGGATCAAGGTGGACCTGCTGGCCCCCATGATCAT
CCATGGCATCAAGACCCAGGGGGCCAGGCAGAAGTTCAGCAGCCTGTACATCAGCCAGTTCATCATCA
TGTACAGCCTGGATGGCAAGAAGTGGCAGACCTACAGGGGCAACAGCACTGGCACCCTGATGGTGTTC
TTTGGCAATGTGGACAGCTCTGGCATCAAGCACAACATCTTCAACCCCCCCATCATTGCCAGATACAT
CAGGCTGCACCCCACCCACTACAGCATCAGGAGCACCCTGAGGATGGAGCTGATGGGCTGTGACCTGA
ACAGCTGCAGCATGCCCCTGGGCATGGAGAGCAAGGCCATCTCTGATGCCCAGATCACTGCCAGCAGC
TACTTCACCAACATGTTTGCCACCTGGAGCCCCAGCAAGGCCAGGCTGCACCTGCAGGGCAGGAGCAA
TGCCTGGAGGCCCCAGGTCAACAACCCCAAGGAGTGGCTGCAGGTGGACTTCCAGAAGACCATGAAGG
TGACTGGGGTGACCACCCAGGGGGTGAAGAGCCTGCTGACCAGCATGTATGTGAAGGAGTTCCTGATC
AGCAGCAGCCAGGATGGCCACCAGTGGACCCTGTTCTTCCAGAATGGCAAGGTGAAGGTGTTCCAGGG
CAACCAGGACAGCTTCACCCCTGTGGTGAACAGCCTGGACCCCCCCCTGCTGACCAGATACCTGAGGA
TTCACCCCCAGAGCTGGGTGCACCAGATTGCCCTGAGGATGGAGGTGCTGGGCTGTGAGGCCCAGGAC
CTGTACTGATTAATTAAGAGCATCTTACCGCCATTTATTCCCATATTTGTTCTGTTTTTCTTGATTTG
GGTATACATTTAAATGTTAATAAAACAAAATGGTGGGGCAATCATTTACATTTTTAGGGATATGTAAT
TACTAGTTCAGGTGTATTGCCACAAGACAAACATGTTAAGAAACTTTCCCGTTATTTACGCTCTGTTC
CTGTTAATCAACCTCTGGATTACAAAATTTGTGAAAGATTGACTGATATTCTTAACTATGTTGCTCCT
TTTACGCTGTGTGGATATGCTGCTTTATAGCCTCTGTATCTAGCTATTGCTTCCCGTACGGCTTTCGT
TTTCTCCTCCTTGTATAAATCCTGGTTGCTGTCTCTTTTAGAGGAGTTGTGGCCCGTTGTCCGTCAAC
GTGGCGTGGTGTGCTCTGTGTTTGCTGACGCAACCCCCACTGGCTGGGGCATTGCCACCACCTGTCAA
CTCCTTTCTGGGACTTTCGCTTTCCCCCTCCCGATCGCCACGGCAGAACTCATCGCCGCCTGCCTTGC
CCGCTGCTGGACAGGGGCTAGGTTGCTGGGCACTGATAATTCCGTGGTGTTGTCTGTGCCTTCTAGTT
GCCAGCCATCTGTTGTTTGCCCCTCCCCCGTGCCTTCCTTGACCCTGGAAGGTGCCACTCCCACTGTC
CTTTCCTAATAAAATGAGGAAATTGCATCGCATTGTCTGAGTAGGTGTCATTCTATTCTGGGGGGTGG
GGTGGGGCAGGACAGCAAGGGGGAGGATTGGGAAGACAATAGCAGGCATGCTGGGGATGCGGTGGGCT
CTATGGCTCTAGAGCATGGCTACGTAGATAAGTAGCATGGCGGGTTAATCATTAACTACACCTGCAGG
AGGAACCCCTAGTGATGGAGTTGGCCACTCCCTCTCTGCGCGCTCGCTCGCTCACTGAGGCCGGGCGA
CCAAAGGTCGCCCGACGCCCGGGCGGCCTCAGTGAGCGAGCGAGCGCGCAGCTGCCTGCAGG

### Example 4: ceDNA with Human SERPINA1 Enhancer Spacer Variants Exhibited at Least Equivalent or Superior Factor VIII In Vivo Expression in Rag2 Mice when Formulated as LNP Compositions

[0499] The objective of this study was to determine and compare the effect of LNP-formulated ceDNA on in vivo expression in male Rag2 mice. where The ceDNA comprising a Factor VIII transgene, as regulated by: (i) 3× version of hSerpEnh enhancer (3×_SerpEnh-control; 1 basepair spapcer “1 mer”); (ii) 3× version of hSerpEnh enhancer with 2-mer spacers (3×_hSerpEnh_“2mer” 2 bp spacers_v9) placed between hSerpEnh enhancer element repeats; or (iii) 3× version of hSerpEnh enhancer with 11-mer spacers (3×_hSerpEnh_11mer spacers_FOXA) placed between hSerpEnh element repeats (see Table 5).

TABLE 5
Test material administration

| | | | Dose | Dose | Dosing | Terminal |
|---|---|---|---|---|---|---|
| Group | No. of | | Levels | Volume | Regimen | Time |
| No. | Animals | Test Material | (mg/kg) | (mL/kg) | ROA | Point |
| 1 | 5 | PBS | 0 | 5 | Once on | Day 42 |
| 2 | 5 | 3x_hSerpEnh | 0.5 | | Day 0 by IV | |
| | | (Control) | | | | |
| 3 | 5 | 3x_hSerpEnh | 2.0 | | | |
| | | (Control) | | | | |
| 4 | 5 | 3x_hSerpEnh_2mer_{—} | 0.5 | | | |
| | | spacers_v9 | | | | |
| 5 | 5 | 3x_hSerpEnh_2mer_{—} | 2.0 | | | |
| | | spacers_v9 | | | | |
| 6 | 5 | 3x_hSerpEnh_11mer_{—} | 0.5 | | | |
| | | spacers_FOXA | | | | |
| 7 | 5 | 3x_hSerpEnh_11mer_{—} | 2.0 | | | |
| | | spacers_FOXA | | | | |

[0500] The mice were dosed intravenously once at Day 0 at a low dose of 0.5 mg/kg or a high dose of 2.0 mg/kg (n=5) and the Factor VIII expression was measured at Days 7, 14, 21, and 28. As shown in FIG. 13, the treated mice exhibited dose-dependent response to the administered LNP formulations e comprising various ceDNA 3× hSerpEnh spacer variants listed above in that a high dose of 2.0 mg/kg consistently resulted in higher Factor VIII expression in the mice, as compared to a low dose of 0.5 mg/kg. Additionally, it was observed that the 3× version of hSerpEnh enhancers that have either 2 bp or 11 bp spacer exhibited at least equivalent or higher Factor VIII expression in the mice, as compared to the control 3×_hSerpEnh enhancer having a 1 bp spacer.

### Example 5: ceDNA with Chinese Tree Shrew SERPINA1 Enhancer Variants Exhibited at Least Equivalent or Superior Factor VIII In Vivo Expression in C57BL/6J Mice when Administered Via Hydrodynamic Tail Vein Injection

[0501] The objective of this study was to determine and compare the effect of ceDNA on in vivo expression in male C57BL/6J mice. The ceDNA comprised a Factor VIII transgene, as regulated by: (i) 3× version of hSerpEnh enhancer (3×_SerpEnh with 1 bp spacer “1 mer”)—control); (ii) 3× version of Chinese Tree Shrew SerpEnh enhancer (3×_ChineseTreeShrew with 1 bp spacer); (iii) 3× version of hSerpEnh enhancer with HNF4 and FOXA transcription factor consensus sites and secondary structure formation minimization (3×_HNF4_FOXA_v1_SecondaryStruct_min_v2 with 1 bp spacer); or (iv) 3× version of Chinese Tree Shrew SerpEnh enhancer with CpG minimization (3×_ChineseTreeShrew_CpG_min with 1 bp spacer) (see Table 6).

TABLE 6
Test material administration

| | | | Dose | Dose | Administration | Dosage |
|---|---|---|---|---|---|---|
| | No. | | Levels | Volume | Route of | Regimen/ |
| Group | Animals | Test Material | (μg/an) | (ml/kg) | (ROA) | Frequency |
| A | 5 | PBS | N/A | 90-100 | HDIV | Once on |
| B | 5 | 3x_hSerpEnh | 50 ng | ml/kg | | Day 0 |
| | | (Control) | | | | |
| C | 5 | 3x_ChineseTreeShrew | | | | |
| D | 5 | 3x_HNF4_FOXA_v1_{—} | | | | |
| | | SecondaryStruct_min_v2 | | | | |
| E | 5 | 3x_ChineseTreeShrew_{—} | | | | |
| | | CpG_min | | | | |

[0502] The mice were dosed intravenously via hydrodynamic tail vein injection once at Day 0 at a dose of 50 ng (n=5) and the Factor VIII expression was measured at Days 1 and 3. As shown in FIG. 14, the 3× version of Chinese Tree Shrew SerpEnh enhancers and 3× version of hSerpEnh enhancer with HNF4 and FOXA transcription factor consensus sites and secondary structure formation minimization exhibited at least equivalent or higher Factor VIII expression in the mice, as compared to the control 3×_hSerpEnh enhancer.

### Example 6: ceDNA with Bushbaby SERPINA1 Enhancer Variants Exhibited Superior Factor VIII In Vivo Expression in C57BL/6J Mice when Administered Via Hydrodynamic Tail Vein Injection

[0503] The objective of this study was to determine and compare the effect of ceDNA on in vivo expression in male C57BL/6J mice, whereby the ceDNA comprised a Factor VIII transgene, as regulated by: (i) 3× version of hSerpEnh enhancer (3×_SerpEnh—positive control); (ii) 3× version of Bushbaby SerpEnh enhancer with adenosine spacer between every two copies of the enhancer (3×_Bushbaby_Aspacers—Sample 1); or (iii) 3× version of Bushbaby SerpEnh enhancer with adenosine spacer between every two copies of the enhancer (3×_Bushbaby_Aspacers—Sample 2); (see Table 7).

TABLE 7
Test material administration

| | No. | | Dose Levels | |
|---|---|---|---|---|
| Group | Animals | Test Material | (μg/an) | Endpoint |
| A | 5 | PBS | 10 ng on Day 0 | Citrate |
| B | 5 | 3x_hSerpEnh | | plasma on |
| | | (Control) | | Day 3 |
| C | 5 | 3x_Bushbaby_Aspacers | | |
| | | (Sample 1) | | |
| D | 5 | 3x_Bushbaby_Aspacers | | |
| | | (Sample 2) | | |

[0504] The mice were dosed hydrodynamically via tail vein injection once at Day 0 at a dose of 10 ng (n=5) and the Factor VIII expression was measured at Day 3. As shown in FIG. 15, the 3× version of Bushbaby SerpEnh enhancer with adenosine nucleotide spacers exhibited higher Factor VIII expression in the mice, as compared to the control 3×_hSerpEnh enhancer.

### Example 7: ceDNA with Armadillo or Tibetan Antelope SERPINA1 Enhancer Variants Exhibited at Least Equivalent Factor VIII In Vivo Expression in C57BL/6J Mice when Administered Via Hydrodynamic Tail Vein Injection

[0505] The objective of this study was to determine and compare the effect of ceDNA on in vivo expression in male C57BL/6J mice, whereby the ceDNA comprised a Factor VIII transgene, as regulated by: (i) 3× version of hSerpEnh enhancer (3× SerpEnh-control); (ii) 3× version of Tibetan Antelope SerpEnh enhancer (3×50ibetan_antelopeSERPINA1_enhancer); or (iii) 3× version of Armadillo SerpEnh enhancer with CpG minimization (3× Armadillo_CpGminSERPINA1 enhancer) (see Table 8).

TABLE 8
Test material administration

| | | | Dose | Dose | Dosing | Terminal |
|---|---|---|---|---|---|---|
| Group | No. of | | Levels | Volume | Regimen | Time |
| No. | Animals | Test Material | (ng/an) | (mL/kg) | ROA | Point |
| 1 | 4 | PBS | 0 | 90-100 | Once on | Day 3 |
| 2 | 4 | 3x_hSerpEnh | 25 | (set volume) | Day 0 by | |
| 3 | 4 | (Control) | 50 | | HDIV | |
| 4 | 4 | | 100 | | | |
| 5 | 4 | 3x_Tibetan_antelope_{—} | 25 | | | |
| 6 | 4 | SERPINA1_enhancer | 50 | | | |
| 7 | 4 | | 100 | | | |
| 8 | 4 | 3x_Armadillo_CpGmin_{—} | 25 | | | |
| 9 | 4 | SERPINA1_enhancer | 50 | | | |
| 10 | 4 | | 100 | | | |
| 11 | 4 | 3x_ChineseTreeShrew | 25 | | | |
| 12 | 4 | | 50 | | | |
| 13 | 4 | | 100 | | | |
| 14 | 4 | 3x_ChineseTreeShrew_{—} | 25 | | | |
| 15 | 4 | CpGmin | 50 | | | |
| 16 | 4 | | 100 | | | |
| 17 | 4 | 3x_Bushbaby_Aspacers | 25 | | | |
| 18 | 4 | | 50 | | | |
| 19 | 4 | | 100 | | | |

[0506] The mice were dosed intravenously via hydrodynamic tail vein injection once at Day 0 at three different dose levels: 25 ng/an, 50 ng/an, 100 ng/an (n=4) and the Factor VIII expression was measured at Day 3. As shown in FIG. 16A and FIG. 16B, the administered ceDNA constructs were dose-responsive in that higher doses of 50 ng/an and 100 ng/an resulted in higher Factor VIII expression in the mice, as compared to a low dose of 25 ng/an. Additionally, it was observed that all tested enhancers exhibited at least equivalent Factor VIII expression in the mice, as compared to the control 3×_hSerpEnh enhancer.

### Example 8: High-Throughput Screening of Human SERPINA1 Enhancer Variants, BushBaby SERPINA1 Enhancer Variants, Chinese Tree Shrew SERPINA1 Enhancer Variants, and Human SERPINA1 Enhancer Variants with HNF4 and FOXA Transcription Factor Consensus Sites

[0507] The following enhancer sequence variants were generated to evaluate their ability to drive expression by high-throughput expression screening:
[0508] (1) all single nucleotide substitution and adjacent di-nucleotide substitution variants for human SERPINA1 enhancer (e.g., single nucleotide variants and adjacent di-nucleotide variants of SEQ ID NO: 81), Chinese Tree Shrew modified SERPINA1 enhancer (e.g.,. single nucleotide substitution and adjacent di-nucleotide substitution variants for SEQ ID NO: 122), BushBaby SERPINA1 enhancer (e.g., single nucleotide variants and adjacent di-nucleotide variants of SEQ ID NO: 83), and human SERPINA1 enhancer variants with HNF4 and FOXA transcription factor consensus sites HNF4_FOXA enhancer i.e., single nucleotide variants and adjacent di-nucleotide variants of SEQ ID NO: 85);
[0509] (2) selected variants of the human SERPINA1 enhancer with four modified nucleotides (i.e., four nucleotide substitution variants of SEQ ID NO: 81); and
[0510] (3) 50 random permutations of the human SERPINA1 enhancer used as a negative control (i.e., random permutations of SEQ ID NO: 81). In total, 5,151 unique sequences were screened. To map sequencing reads back to enhancer sequences, all screened sequenced were associated with one or more 10 nucleotide barcodes with a minimum Levenshtein distance of two nucleotides between all barcodes. Original enhancer sequences were each associated with 200 barcodes and all variants were associated with one barcode. Enhancer sequences and barcodes were generated with custom MATLAB scripts.

[0511] An oligo pool of the enhancers was ordered from Twist Biosciences and the plasmid library, pHTS002L (FIG. 17), with luciferase as the reporter gene, was constructed. HepG2 cells (ATCC, VA) were cultured in DMEM (Dulbecco's Modified Eagle Medium) medium (ThermoFisher, MA) with 10% fetal bovine serum (ThermoFisher, MA) at 37° C. The day before transfection, cells were harvested with 0.25% trypsin (ThermoFisher, MA) and seeded at the density of 600,000 cells per well on 6-well collagen-coated plates (VWR, PA). 2 ug plasmid were transfected per well with TransfeX (ATCC, VA) according to the manufacture's manual. The cells were harvested 24 hours after transfection and total RNA were extracted with the RNAeasy plus kit (Qiagen, Germany). 1 ug RNA or 10 ng plasmid DNA were used for amplicon production using the primers in Table 9 with SuperScript™ IV One-Step RT-PCR System (ThermoFisher, MA) according to the manufacture's manual. Amplicons contained the barcode associated with each enhancer. The concentrations of the 6 indexed amplicons were measured with Qubit (ThermoFisher, MA). The amplicons were sequenced with Illumina Miseq (75 bp×2) at MIT BioMicro Center.

TABLE 9
Primers used for amplicon production

| | | |
|---|---|---|
| Forward | SEQ ID | AATGATACGGCGACCACCGAGATCTACACTCTTTCCCTACACGACGCTCT |
| | NO: 148 | TCCGATCTGGAGGGAAGATTGCTGTGTGATAG |
| Reverse 1 | SEQ ID | CAAGCAGAAGACGGCATACGAGATGTGACTGTGACTGGAGTTCAGACGTG |
| | NO: 149 | TGCTCTTCCGATCT CAG GAA CAG AGC GTA AAT AAC GGG |
| Reverse 2 | SEQ ID | CAAGCAGAAGACGGCATACGAGATCTGCAAGTGACTGGAGTTCAGACGTG |
| | NO: 150 | TGCTCTTCCGATCT CAG GAA CAG AGC GTA AAT AAC GGG |
| Reverse 3 | SEQ ID | CAAGCAGAAGACGGCATACGAGATACCATGGTGACTGGAGTTCAGACGTG |
| | NO: 151 | TGCTCTTCCGATCT CAG GAA CAG AGC GTA AAT AAC GGG |
| Reverse 4 | SEQ ID | CAAGCAGAAGACGGCATACGAGATGAACGTGTGACTGGAGTTCAGACGTG |
| | NO: 152 | TGCTCTTCCGATCT CAG GAA CAG AGC GTA AAT AAC GGG |
| Reverse 5 | SEQ ID | CAAGCAGAAGACGGCATACGAGATACTAGTGTGACTGGAGTTCAGACGTG |
| | NO: 153 | TGCTCTTCCGATCT CAG GAA CAG AGC GTA AAT AAC GGG |
| Reverse 6 | SEQ ID | CAAGCAGAAGACGGCATACGAGATCGTTACGTGACTGGAGTTCAGACGTG |
| | NO: 154 | TGCTCTTCCGATCT CAG GAA CAG AGC GTA AAT AAC GGG |

[0512] Reads were filtered out that (1) did not contain the expected sequence for the 10 nucleotides up- and downstream of the barcode and (2) contained quality scores less than 20 in the barcode (FASTX-Toolkit). Barcode counts for each RNA sample were normalized to the corresponding barcode counts for an input DNA sample and mapped back to their associated enhancer sequences (custom MATLAB script). Comparisons for two biological replicates are shown in FIGS. 18A-18D.

[0513] The enhancer variants that exhibited higher expression levels than the expression levels of their respective original sequences (i.e., SEQ ID NOs: 81, 122, 83, or 85) are listed in Table 10 (human SERPINA1 enhancer variants); Table 11 (Chinese Tree Shrew SERPINA1 enhancer variants), Table 12 (BushBaby SERPINA 1 enhancer variants, and Table 13 (human SERPINA1 enhancer variants with HNF4 and FOXA transcription factor consensus sites). Of note, single nucleotide substitution variants of the human SERPINA1 enhancer, single nucleotide substitution variants of the Chinese Tree Shrew SERPINA1 enhancer, and single nucleotide substitution variants of the Bushbaby SERPINA1 enhancer that each carry a CTAAG -> CAAAG mutation were consistently among the highest expression variants among their respective variant populations (see FIGS. 18A-18C). As indicated in FIG. 19 that shows the alignment of multiple SERPINA1 enhancer sequences, the CAAAG sequence is located in the HNF4 transcription factor consensus site in SEQ ID NO: 85, the sequence of the human SERPINA1 enhancer variants with HNF4 and FOXA transcription factor consensus sites HNF4_FOXA enhancer. When the CAAAG sequence is modified to CTAAG, the expression levels of the reciprocal variant were compromised (see FIG. 18D).

TABLE 10
Single, adjacent di-, or four nucleotide substitution variants of human SERPINA1 enhancer with higher luciferase
expression than original sequence SEQ ID NO: 81

| SEQ ID | | |
|---|---|---|
| NO: | Human SERPINA1 enhancer variant | Sequence |
| 155 | 202_Human_monoMut_G1C_n1 | CGGGGAGGCTGCTGGTGAATATTAACCAAGGTCACCCCAGITATCGGAGGAGCAAACAGGGGCTAAGTCCA |
| | | C |
| 156 | 204_Human_monoMut_G2A_n1 | GAGGGAGGCTGCTGGTGAATATTAACCAAGGTCACCCCAGTTATCGGAGGAGCAAACAGGGGCTAAGTCCA |
| | | C |
| 157 | 206_Human_monoMut_G2T_n1 | GTGGGAGGCTGCTGGTGAATATTAACCAAGGTCACCCCAGTTATCGGAGGAGCAAACAGGGGCTAAGTCCA |
| | | C |
| 158 | 210_Human_monoMut_G4A_n1 | GGGAGAGGCTGCTGGTGAATATTAACCAAGGTCACCCCAGTTATCGGAGGAGCAAACAGGGGCTAAGTCCA |
| | | C |
| 159 | 214_Human_monoMut_G5C_n1 | GGGGCAGGCTGCTGGTGAATATTAACCAAGGTCACCCCAGTTATCGGAGGAGCAAACAGGGGCTAAGTCCA |
| | | C |
| 160 | 216_Human_monoMut_A6C_n1 | GGGGGCGGCTGCTGGTGAATATTAACCAAGGTCACCCCAGTTATCGGAGGAGCAAACAGGGGCTAAGTCCA |
| | | C |
| 161 | 220_Human_monoMut_G7C_n1 | GGGGGACGCTGCTGGTGAATATTAACCAAGGTCACCCCAGTTATCGGAGGAGCAAACAGGGGCTAAGTCCA |
| | | C |
| 162 | 225_Human_monoMut_C9A_n1 | GGGGGAGGATGCTGGTGAATATTAACCAAGGTCACCCCAGTTATCGGAGGAGCAAACAGGGGCTAAGTCCA |
| | | C |
| 163 | 226_Human_monoMut_C9G_n1 | GGGGGAGGGTGCTGGTGAATATTAACCAAGGTCACCCCAGTTATCGGAGGAGCAAACAGGGGCTAAGTCCA |
| | | C |
| 164 | 229_Human_monoMut_T10C_n1 | GGGGGAGGCCGCTGGTGAATATTAACCAAGGTCACCCCAGTTATCGGAGGAGCAAACAGGGGCTAAGTCCA |
| | | C |
| 165 | 230_Human_monoMut_T10G_n1 | GGGGGAGGCGGCTGGTGAATATTAACCAAGGTCACCCCAGTTATCGGAGGAGCAAACAGGGGCTAAGTCCA |
| | | C |
| 166 | 235_Human_monoMut_C12G_n1 | GGGGGAGGCTGGTGGTGAATATTAACCAAGGTCACCCCAGTTATCGGAGGAGCAAACAGGGGCTAAGTCCA |
| | | C |
| 167 | 236_Human_monoMut_C12T_n1 | GGGGGAGGCTGTTGGTGAATATTAACCAAGGTCACCCCAGTTATCGGAGGAGCAAACAGGGGCTAAGTCCA |
| | | C |
| 168 | 245_Human_monoMut_G15T_n1 | GGGGGAGGCTGCTGTTGAATATTAACCAAGGTCACCCCAGTTATCGGAGGAGCAAACAGGGGCTAAGTCCA |
| | | C |
| 169 | 247_Human_monoMut_T16C_n1 | GGGGGAGGCTGCTGGCGAATATTAACCAAGGTCACCCCAGTTATCGGAGGAGCAAACAGGGGCTAAGTCCA |
| | | C |
| 170 | 250_Human_monoMut_G17C_n1 | GGGGGAGGCTGCTGGTCAATATTAACCAAGGTCACCCCAGITATCGGAGGAGCAAACAGGGGCTAAGTCCA |
| | | C |
| 171 | 251_Human_monoMut_G17T_n1 | GGGGGAGGCTGCTGGTTAATATTAACCAAGGTCACCCCAGTTATCGGAGGAGCAAACAGGGGCTAAGTCCA |
| | | C |
| 172 | 260_Human_monoMut_T20G_n1 | GGGGGAGGCTGCTGGTGAAGATTAACCAAGGTCACCCCAGTTATCGGAGGAGCAAACAGGGGCTAAGTCCA |
| | | C |
| 173 | 261_Human_monoMut_A21C_n1 | GGGGGAGGCTGCTGGTGAATCTTAACCAAGGTCACCCCAGTTATCGGAGGAGCAAACAGGGGCTAAGTCCA |
| | | C |
| 174 | 263_Human_monoMut_A21T_n1 | GGGGGAGGCTGCTGGTGAATTTTAACCAAGGTCACCCCAGTTATCGGAGGAGCAAACAGGGGCTAAGTCCA |
| | | C |
| 175 | 264_Human_monoMut_T22A_n1 | GGGGGAGGCTGCTGGTGAATAATAACCAAGGTCACCCCAGTTATCGGAGGAGCAAACAGGGGCTAAGTCCA |
| | | C |
| 176 | 269_Human_monoMut_T23G_n1 | GGGGGAGGCTGCTGGTGAATATGAACCAAGGTCACCCCAGTTATCGGAGGAGCAAACAGGGGCTAAGTCCA |
| | | C |
| 177 | 270_Human_monoMut_A24C_n1 | GGGGGAGGCTGCTGGTGAATATTCACCAAGGTCACCCCAGTTATCGGAGGAGCAAACAGGGGCTAAGTCCA |
| | | C |
| 178 | 274_Human_monoMut_A25G_n1 | GGGGGAGGCTGCTGGTGAATATTAGCCAAGGTCACCCCAGTTATCGGAGGAGCAAACAGGGGCTAAGTCCA |
| | | C |
| 179 | 275_Human_monoMut_A25T_n1 | GGGGGAGGCTGCTGGTGAATATTATCCAAGGTCACCCCAGTTATCGGAGGAGCAAACAGGGGCTAAGTCCA |
| | | C |
| 180 | 278_Human_monoMut_C26T_n1 | GGGGGAGGCTGCTGGTGAATATTAATCAAGGTCACCCCAGTTATCGGAGGAGCAAACAGGGGCTAAGTCCA |
| | | C |
| 181 | 282_Human_monoMut_A28C_n1 | GGGGGAGGCTGCTGGTGAATATTAACCCAGGTCACCCCAGTTATCGGAGGAGCAAACAGGGGCTAAGTCCA |
| | | C |
| 182 | 283_Human_monoMut_A28G_n1 | GGGGGAGGCTGCTGGTGAATATTAACCGAGGTCACCCCAGTTATCGGAGGAGCAAACAGGGGCTAAGTCCA |
| | | C |
| 183 | 284_Human_monoMut_A28T_n1 | GGGGGAGGCTGCTGGTGAATATTAACCTAGGTCACCCCAGTTATCGGAGGAGCAAACAGGGGCTAAGTCCA |
| | | C |
| 184 | 295_Human_monoMut_T32C_n1 | GGGGGAGGCTGCTGGTGAATATTAACCAAGGCCACCCCAGTTATCGGAGGAGCAAACAGGGGCTAAGTCCA |
| | | C |
| 185 | 301_Human_monoMut_A34G_n1 | GGGGGAGGCTGCTGGTGAATATTAACCAAGGTCGCCCCAGTTATCGGAGGAGCAAACAGGGGCTAAGTCCA |
| | | C |
| 186 | 303_Human_monoMut_C35A_n1 | GGGGGAGGCTGCTGGTGAATATTAACCAAGGTCAACCCAGTTATCGGAGGAGCAAACAGGGGCTAAGTCCA |
| | | C |
| 187 | 304_Human_monoMut_C35G_n1 | GGGGGAGGCTGCTGGTGAATATTAACCAAGGTCAGCCCAGTTATCGGAGGAGCAAACAGGGGCTAAGTCCA |
| | | C |
| 188 | 305_Human_monoMut_C35T_n1 | GGGGGAGGCTGCTGGTGAATATTAACCAAGGTCATCCCAGTTATCGGAGGAGCAAACAGGGGCTAAGTCCA |
| | | C |
| 189 | 308_Human_monoMut_C36T_n1 | GGGGGAGGCTGCTGGTGAATATTAACCAAGGTCACTCCAGTTATCGGAGGAGCAAACAGGGGCTAAGTCCA |
| | | C |
| 190 | 314_Human_monoMut_C38T_n1 | GGGGGAGGCTGCTGGTGAATATTAACCAAGGTCACCCTAGTTATCGGAGGAGCAAACAGGGGCTAAGTCCA |
| | | C |
| 191 | 315_Human_monoMut_A39C_n1 | GGGGGAGGCTGCTGGTGAATATTAACCAAGGTCACCCCCGTTATCGGAGGAGCAAACAGGGGCTAAGTCCA |
| | | C |
| 192 | 316_Human_monoMut_A39G_n1 | GGGGGAGGCTGCTGGTGAATATTAACCAAGGTCACCCCGGTTATCGGAGGAGCAAACAGGGGCTAAGTCCA |
| | | C |
| 193 | 317_Human_monoMut_A39T_n1 | GGGGGAGGCTGCTGGTGAATATTAACCAAGGTCACCCCTGTTATCGGAGGAGCAAACAGGGGCTAAGTCCA |
| | | C |
| 194 | 325_Human_monoMut_T42C_n1 | GGGGGAGGCTGCTGGTGAATATTAACCAAGGTCACCCCAGTCATCGGAGGAGCAAACAGGGGCTAAGTCCA |
| | | C |
| 195 | 328_Human_monoMut_A43G_n1 | GGGGGAGGCTGCTGGTGAATATTAACCAAGGTCACCCCAGTIGTCGGAGGAGCAAACAGGGGCTAAGTCCA |
| | | C |
| 196 | 331_Human_monoMut_T44C_n1 | GGGGGAGGCTGCTGGTGAATATTAACCAAGGTCACCCCAGTTACCGGAGGAGCAAACAGGGGCTAAGTCCA |
| | | C |
| 197 | 332_Human_monoMut_T44G_n1 | GGGGGAGGCTGCTGGTGAATATTAACCAAGGTCACCCCAGTTAGCGGAGGAGCAAACAGGGGCTAAGTCCA |
| | | C |
| 198 | 333_Human_monoMut_C45A_n1 | GGGGGAGGCTGCTGGTGAATATTAACCAAGGTCACCCCAGTTATAGGAGGAGCAAACAGGGGCTAAGTCCA |
| | | C |
| 199 | 334_Human_monoMut_C45G_n1 | GGGGGAGGCTGCTGGTGAATATTAACCAAGGTCACCCCAGTTATGGGAGGAGCAAACAGGGGCTAAGTCCA |
| | | C |
| 200 | 337_Human_monoMut_G46C_n1 | GGGGGAGGCTGCTGGTGAATATTAACCAAGGTCACCCCAGTTATCCGAGGAGCAAACAGGGGCTAAGTCCA |
| | | C |
| 201 | 344_Human_monoMut_A48T_n1 | GGGGGAGGCTGCTGGTGAATATTAACCAAGGTCACCCCAGTTATCGGTGGAGCAAACAGGGGCTAAGTCCA |
| | | C |
| 202 | 345_Human_monoMut_G49A_n1 | GGGGGAGGCTGCTGGTGAATATTAACCAAGGTCACCCCAGTTATCGGAAGAGCAAACAGGGGCTAAGTCCA |
| | | C |
| 203 | 346_Human_monoMut_G49C_n1 | GGGGGAGGCTGCTGGTGAATATTAACCAAGGTCACCCCAGTTATCGGACGAGCAAACAGGGGCTAAGTCCA |
| | | C |
| 204 | 347_Human_monoMut_G49T_n1 | GGGGGAGGCTGCTGGTGAATATTAACCAAGGTCACCCCAGTTATCGGATGAGCAAACAGGGGCTAAGTCCA |
| | | C |
| 205 | 351_Human_monoMut_A51C_n1 | GGGGGAGGCTGCTGGTGAATATTAACCAAGGTCACCCCAGTTATCGGAGGCGCAAACAGGGGCTAAGTCCA |
| | | C |
| 206 | 353_Human_monoMut_A51T_n1 | GGGGGAGGCTGCTGGTGAATATTAACCAAGGTCACCCCAGTTATCGGAGGTGCAAACAGGGGCTAAGTCCA |
| | | C |
| 207 | 354_Human_monoMut_G52A_n1 | GGGGGAGGCTGCTGGTGAATATTAACCAAGGTCACCCCAGTTATCGGAGGAACAAACAGGGGCTAAGTCCA |
| | | C |
| 208 | 356_Human_monoMut_G52T_n1 | GGGGGAGGCTGCTGGTGAATATTAACCAAGGTCACCCCAGTTATCGGAGGATCAAACAGGGGCTAAGTCCA |
| | | C |
| 209 | 371_Human_monoMut_C57T_n1 | GGGGGAGGCTGCTGGTGAATATTAACCAAGGTCACCCCAGTTATCGGAGGAGCAAATAGGGGCTAAGTCCA |
| | | C |
| 218 | 375_Human_monoMut_G59A_n1 | GGGGGAGGCTGCTGGTGAATATTAACCAAGGTCACCCCAGTTATCGGAGGAGCAAACAAGGGCTAAGTCCA |
| | | C |
| 219 | 380_Human_monoMut_G60T_n1 | GGGGGAGGCTGCTGGTGAATATTAACCAAGGTCACCCCAGTTATCGGAGGAGCAAACAGTGGCTAAGTCCA |
| | | C |
| 220 | 381_Human_monoMut_G61A_n1 | GGGGGAGGCTGCTGGTGAATATTAACCAAGGTCACCCCAGTTATCGGAGGAGCAAACAGGAGCTAAGTCCA |
| | | C |
| 221 | 383_Human_monoMut_G61T_n1 | GGGGGAGGCTGCTGGTGAATATTAACCAAGGTCACCCCAGTTATCGGAGGAGCAAACAGGTGCTAAGTCCA |
| | | C |
| 222 | 386_Human_monoMut_G62T_n1 | GGGGGAGGCTGCTGGTGAATATTAACCAAGGTCACCCCAGTTATCGGAGGAGCAAACAGGGTCTAAGTCCA |
| | | C |
| 223 | 390_Human_monoMut_T64A_n1 | GGGGGAGGCTGCTGGTGAATATTAACCAAGGTCACCCCAGTTATCGGAGGAGCAAACAGGGGCAAAGTCCA |
| | | C |
| 224 | 392_Human_monoMut_T64G_n1 | GGGGGAGGCTGCTGGTGAATATTAACCAAGGTCACCCCAGTTATCGGAGGAGCAAACAGGGGCGAAGTCCA |
| | | C |
| 225 | 394_Human_monoMut_A65G_n1 | GGGGGAGGCTGCTGGTGAATATTAACCAAGGTCACCCCAGTTATCGGAGGAGCAAACAGGGGCTGAGTCCA |
| | | C |
| 226 | 405_Human_monoMut_C69A_n1 | GGGGGAGGCTGCTGGTGAATATTAACCAAGGTCACCCCAGTTATCGGAGGAGCAAACAGGGGCTAAGTACA |
| | | C |
| 227 | 414_Human_monoMut_C72A_n1 | GGGGGAGGCTGCTGGTGAATATTAACCAAGGTCACCCCAGTTATCGGAGGAGCAAACAGGGGCTAAGTCCA |
| | | A |
| 228 | 415_Human_monoMut_C72G_n1 | GGGGGAGGCTGCTGGTGAATATTAACCAAGGTCACCCCAGTTATCGGAGGAGCAAACAGGGGCTAAGTCCA |
| | | G |
| 229 | 421_Human_diMut_GG1CC_n1 | CCGGGAGGCTGCTGGTGAATATTAACCAAGGTCACCCCAGTTATCGGAGGAGCAAACAGGGGCTAAGTCCA |
| | | C |
| 230 | 427_Human_diMut_GG2AC_n1 | GACGGAGGCTGCTGGTGAATATTAACCAAGGTCACCCCAGTTATCGGAGGAGCAAACAGGGGCTAAGTCCA |
| | | C |
| 231 | 429_Human_diMut_GG2CA_n1 | GCAGGAGGCTGCTGGTGAATATTAACCAAGGTCACCCCAGTTATCGGAGGAGCAAACAGGGGCTAAGTCCA |
| | | C |
| 232 | 430_Human_diMut_GG2CC_n1 | GCCGGAGGCTGCTGGTGAATATTAACCAAGGTCACCCCAGTTATCGGAGGAGCAAACAGGGGCTAAGTCCA |
| | | C |
| 233 | 439_Human_diMut_GG3CC_n1 | GGCCGAGGCTGCTGGTGAATATTAACCAAGGTCACCCCAGTTATCGGAGGAGCAAACAGGGGCTAAGTCCA |
| | | C |
| 234 | 440_Human_diMut_GG3CT_n1 | GGCTGAGGCTGCTGGTGAATATTAACCAAGGTCACCCCAGTTATCGGAGGAGCAAACAGGGGCTAAGTCCA |
| | | C |
| 235 | 443_Human_diMut_GG3TT_n1 | GGTTGAGGCTGCTGGTGAATATTAACCAAGGTCACCCCAGTTATCGGAGGAGCAAACAGGGGCTAAGTCCA |
| | | C |
| 236 | 444_Human_diMut_GG4AA_n1 | GGGAAAGGCTGCTGGTGAATATTAACCAAGGTCACCCCAGTTATCGGAGGAGCAAACAGGGGCTAAGTCCA |
| | | C |
| 237 | 447_Human_diMut_GG4CA_n1 | GGGCAAGGCTGCTGGTGAATATTAACCAAGGTCACCCCAGTTATCGGAGGAGCAAACAGGGGCTAAGTCCA |
| | | C |
| 238 | 448_Human_diMut_GG4CC_n1 | GGGCCAGGCTGCTGGTGAATATTAACCAAGGTCACCCCAGTTATCGGAGGAGCAAACAGGGGCTAAGTCCA |
| | | C |
| 239 | 452_Human_diMut_GG4TT_n1 | GGGTTAGGCTGCTGGTGAATATTAACCAAGGTCACCCCAGTTATCGGAGGAGCAAACAGGGGCTAAGTCCA |
| | | C |
| 240 | 453_Human_diMut_GA5AC_n1 | GGGGACGGCTGCTGGTGAATATTAACCAAGGTCACCCCAGTTATCGGAGGAGCAAACAGGGGCTAAGTCCA |
| | | C |
| 241 | 456_Human_diMut_GA5CC_n1 | GGGGCCGGCTGCTGGTGAATATTAACCAAGGTCACCCCAGTTATCGGAGGAGCAAACAGGGGCTAAGTCCA |
| | | C |
| 242 | 461_Human_diMut_GA5TT_n1 | GGGGTTGGCTGCTGGTGAATATTAACCAAGGTCACCCCAGTTATCGGAGGAGCAAACAGGGGCTAAGTCCA |
| | | C |
| 243 | 462_Human_diMut_AG6CA_n1 | GGGGGCAGCTGCTGGTGAATATTAACCAAGGTCACCCCAGTTATCGGAGGAGCAAACAGGGGCTAAGTCCA |
| | | C |
| 244 | 464_Human_diMut_AG6CT_n1 | GGGGGCTGCTGCTGGTGAATATTAACCAAGGTCACCCCAGTTATCGGAGGAGCAAACAGGGGCTAAGTCCA |
| | | C |
| 245 | 465_Human_diMut_AG6GA_n1 | GGGGGGAGCTGCTGGTGAATATTAACCAAGGTCACCCCAGTTATCGGAGGAGCAAACAGGGGCTAAGTCCA |
| | | C |
| 246 | 468_Human_diMut_AG6TA_n1 | GGGGGTAGCTGCTGGTGAATATTAACCAAGGTCACCCCAGTTATCGGAGGAGCAAACAGGGGCTAAGTCCA |
| | | C |
| 247 | 469_Human_diMut_AG6TC_n1 | GGGGGTCGCTGCTGGTGAATATTAACCAAGGTCACCCCAGTTATCGGAGGAGCAAACAGGGGCTAAGTCCA |
| | | C |
| 248 | 470_Human_diMut_AG6TT_n1 | GGGGGTTGCTGCTGGTGAATATTAACCAAGGTCACCCCAGTTATCGGAGGAGCAAACAGGGGCTAAGTCCA |
| | | C |
| 249 | 471_Human_diMut_GG7AA_n1 | GGGGGAAACTGCTGGTGAATATTAACCAAGGTCACCCCAGTTATCGGAGGAGCAAACAGGGGCTAAGTCCA |
| | | C |
| 250 | 472_Human_diMut_GG7AC_n1 | GGGGGAACCTGCTGGTGAATATTAACCAAGGTCACCCCAGTTATCGGAGGAGCAAACAGGGGCTAAGTCCA |
| | | C |
| 251 | 473_Human_diMut_GG7AT_n1 | GGGGGAATCTGCTGGTGAATATTAACCAAGGTCACCCCAGTTATCGGAGGAGCAAACAGGGGCTAAGTCCA |
| | | C |
| 252 | 475_Human_diMut_GG7CC_n1 | GGGGGACCCTGCTGGTGAATATTAACCAAGGTCACCCCAGTTATCGGAGGAGCAAACAGGGGCTAAGTCCA |
| | | C |
| 253 | 478_Human_diMut_GG7TC_n1 | GGGGGATCCTGCTGGTGAATATTAACCAAGGTCACCCCAGTTATCGGAGGAGCAAACAGGGGCTAAGTCCA |
| | | C |
| 254 | 482_Human_diMut_GC8AT_n1 | GGGGGAGATTGCTGGTGAATATTAACCAAGGTCACCCCAGTTATCGGAGGAGCAAACAGGGGCTAAGTCCA |
| | | C |
| 255 | 483_Human_diMut_GC8CA_n1 | GGGGGAGCATGCTGGTGAATATTAACCAAGGTCACCCCAGTTATCGGAGGAGCAAACAGGGGCTAAGTCCA |
| | | C |
| 256 | 484_Human_diMut_GC8CG_n1 | GGGGGAGCGTGCTGGTGAATATTAACCAAGGTCACCCCAGTTATCGGAGGAGCAAACAGGGGCTAAGTCCA |
| | | C |
| 257 | 488_Human_diMut_GC8TT_n1 | GGGGGAGTTTGCTGGTGAATATTAACCAAGGTCACCCCAGTTATCGGAGGAGCAAACAGGGGCTAAGTCCA |
| | | C |
| 258 | 490_Human_diMut_CT9AC_n1 | GGGGGAGGACGCTGGTGAATATTAACCAAGGTCACCCCAGTTATCGGAGGAGCAAACAGGGGCTAAGTCCA |
| | | C |
| 259 | 491_Human_diMut_CT9AG_n1 | GGGGGAGGAGGCTGGTGAATATTAACCAAGGTCACCCCAGTTATCGGAGGAGCAAACAGGGGCTAAGTCCA |
| | | C |
| 260 | 492_Human_diMut_CT9GA_n1 | GGGGGAGGGAGCTGGTGAATATTAACCAAGGTCACCCCAGTTATCGGAGGAGCAAACAGGGGCTAAGTCCA |
| | | C |
| 261 | 493_Human_diMut_CT9GC_n1 | GGGGGAGGGCGCTGGTGAATATTAACCAAGGTCACCCCAGTTATCGGAGGAGCAAACAGGGGCTAAGTCCA |
| | | C |
| 262 | 494_Human_diMut_CT9GG_n1 | GGGGGAGGGGGCTGGTGAATATTAACCAAGGTCACCCCAGTTATCGGAGGAGCAAACAGGGGCTAAGTCCA |
| | | C |
| 263 | 495_Human_diMut_CT9TA_n1 | GGGGGAGGTAGCTGGTGAATATTAACCAAGGTCACCCCAGTTATCGGAGGAGCAAACAGGGGCTAAGTCCA |
| | | C |
| 264 | 496_Human_diMut_CT9TC_n1 | GGGGGAGGTCGCTGGTGAATATTAACCAAGGTCACCCCAGTTATCGGAGGAGCAAACAGGGGCTAAGTCCA |
| | | C |
| 265 | 502_Human_diMut_TG10CC_n1 | GGGGGAGGCCCCTGGTGAATATTAACCAAGGTCACCCCAGTTATCGGAGGAGCAAACAGGGGCTAAGTCCA |
| | | C |
| 266 | 503_Human_diMut_TG10CT_n1 | GGGGGAGGCCTCTGGTGAATATTAACCAAGGTCACCCCAGTTATCGGAGGAGCAAACAGGGGCTAAGTCCA |
| | | C |
| 267 | 504_Human_diMut_TG10GA_n1 | GGGGGAGGCGACTGGTGAATATTAACCAAGGTCACCCCAGTTATCGGAGGAGCAAACAGGGGCTAAGTCCA |
| | | C |
| 268 | 506_Human_diMut_TG10GT_n1 | GGGGGAGGCGTCTGGTGAATATTAACCAAGGTCACCCCAGTTATCGGAGGAGCAAACAGGGGCTAAGTCCA |
| | | C |
| 269 | 507_Human_diMut_GC11AA_n1 | GGGGGAGGCTAATGGTGAATATTAACCAAGGTCACCCCAGTTATCGGAGGAGCAAACAGGGGCTAAGTCCA |
| | | C |
| 270 | 510_Human_diMut_GC11CA_n1 | GGGGGAGGCTCATGGTGAATATTAACCAAGGTCACCCCAGTTATCGGAGGAGCAAACAGGGGCTAAGTCCA |
| | | C |
| 271 | 511_Human_diMut_GC11CG_n1 | GGGGGAGGCTCGTGGTGAATATTAACCAAGGTCACCCCAGTTATCGGAGGAGCAAACAGGGGCTAAGTCCA |
| | | C |
| 272 | 512_Human_diMut_GC11CT_n1 | GGGGGAGGCTCTTGGTGAATATTAACCAAGGTCACCCCAGTTATCGGAGGAGCAAACAGGGGCTAAGTCCA |
| | | C |
| 273 | 516_Human_diMut_CT12AA_n1 | GGGGGAGGCTGAAGGTGAATATTAACCAAGGTCACCCCAGTTATCGGAGGAGCAAACAGGGGCTAAGTCCA |
| | | C |
| 274 | 517_Human_diMut_CT12AC_n1 | GGGGGAGGCTGACGGTGAATATTAACCAAGGTCACCCCAGTTATCGGAGGAGCAAACAGGGGCTAAGTCCA |
| | | C |
| 275 | 521_Human_diMut_CT12GG_n1 | GGGGGAGGCTGGGGGTGAATATTAACCAAGGTCACCCCAGTTATCGGAGGAGCAAACAGGGGCTAAGTCCA |
| | | C |
| 276 | 522_Human_diMut_CT12TA_n1 | GGGGGAGGCTGTAGGTGAATATTAACCAAGGTCACCCCAGTTATCGGAGGAGCAAACAGGGGCTAAGTCCA |
| | | C |
| 277 | 523_Human_diMut_CT12TC_n1 | GGGGGAGGCTGTCGGTGAATATTAACCAAGGTCACCCCAGTTATCGGAGGAGCAAACAGGGGCTAAGTCCA |
| | | C |
| 278 | 524_Human_diMut_CT12TG_n1 | GGGGGAGGCTGTGGGTGAATATTAACCAAGGTCACCCCAGTTATCGGAGGAGCAAACAGGGGCTAAGTCCA |
| | | C |
| 279 | 528_Human_diMut_TG13CA_n1 | GGGGGAGGCTGCCAGTGAATATTAACCAAGGTCACCCCAGTTATCGGAGGAGCAAACAGGGGCTAAGTCCA |
| | | C |
| 280 | 544_Human_diMut_GT15AC_n1 | GGGGGAGGCTGCTGACGAATATTAACCAAGGTCACCCCAGTTATCGGAGGAGCAAACAGGGGCTAAGTCCA |
| | | C |
| 281 | 549_Human_diMut_GT15TA_n1 | GGGGGAGGCTGCTGTAGAATATTAACCAAGGTCACCCCAGTTATCGGAGGAGCAAACAGGGGCTAAGTCCA |
| | | C |
| 282 | 551_Human_diMut_GT15TG_n1 | GGGGGAGGCTGCTGTGGAATATTAACCAAGGTCACCCCAGTTATCGGAGGAGCAAACAGGGGCTAAGTCCA |
| | | C |
| 283 | 552_Human_diMut_TG16AA_n1 | GGGGGAGGCTGCTGGAAAATATTAACCAAGGTCACCCCAGTTATCGGAGGAGCAAACAGGGGCTAAGTCCA |
| | | C |
| 284 | 553_Human_diMut_TG16AC_n1 | GGGGGAGGCTGCTGGACAATATTAACCAAGGTCACCCCAGTTATCGGAGGAGCAAACAGGGGCTAAGTCCA |
| | | C |
| 285 | 554_Human_diMut_TG16AT_n1 | GGGGGAGGCTGCTGGATAATATTAACCAAGGTCACCCCAGTTATCGGAGGAGCAAACAGGGGCTAAGTCCA |
| | | C |
| 286 | 555_Human_diMut_TG16CA_n1 | GGGGGAGGCTGCTGGCAAATATTAACCAAGGTCACCCCAGTTATCGGAGGAGCAAACAGGGGCTAAGTCCA |
| | | C |
| 287 | 557_Human_diMut_TG16CT_n1 | GGGGGAGGCTGCTGGCTAATATTAACCAAGGTCACCCCAGTTATCGGAGGAGCAAACAGGGGCTAAGTCCA |
| | | C |
| 288 | 558_Human_diMut_TG16GA_n1 | GGGGGAGGCTGCTGGGAAATATTAACCAAGGTCACCCCAGTTATCGGAGGAGCAAACAGGGGCTAAGTCCA |
| | | C |
| 289 | 561_Human_diMut_GA17AC_n1 | GGGGGAGGCTGCTGGTACATATTAACCAAGGTCACCCCAGTTATCGGAGGAGCAAACAGGGGCTAAGTCCA |
| | | C |
| 290 | 563_Human_diMut_GA17AT_n1 | GGGGGAGGCTGCTGGTATATATTAACCAAGGTCACCCCAGTTATCGGAGGAGCAAACAGGGGCTAAGTCCA |
| | | C |
| 291 | 565_Human_diMut_GA17CG_n1 | GGGGGAGGCTGCTGGTCGATATTAACCAAGGTCACCCCAGTTATCGGAGGAGCAAACAGGGGCTAAGTCCA |
| | | C |
| 292 | 568_Human_diMut_GA17TG_n1 | GGGGGAGGCTGCTGGTTGATATTAACCAAGGTCACCCCAGTTATCGGAGGAGCAAACAGGGGCTAAGTCCA |
| | | C |
| 293 | 572_Human_diMut_AA18CT_n1 | GGGGGAGGCTGCTGGTGCTTATTAACCAAGGTCACCCCAGTTATCGGAGGAGCAAACAGGGGCTAAGTCCA |
| | | C |
| 294 | 578_Human_diMut_AA18TT_n1 | GGGGGAGGCTGCTGGTGTTTATTAACCAAGGTCACCCCAGTTATCGGAGGAGCAAACAGGGGCTAAGTCCA |
| | | C |
| 295 | 583_Human_diMut_AT19GC_n1 | GGGGGAGGCTGCTGGTGAGCATTAACCAAGGTCACCCCAGTTATCGGAGGAGCAAACAGGGGCTAAGTCCA |
| | | C |
| 296 | 584_Human_diMut_AT19GG_n1 | GGGGGAGGCTGCTGGTGAGGATTAACCAAGGTCACCCCAGTTATCGGAGGAGCAAACAGGGGCTAAGTCCA |
| | | C |
| 297 | 585_Human_diMut_AT19TA_n1 | GGGGGAGGCTGCTGGTGATAATTAACCAAGGTCACCCCAGTTATCGGAGGAGCAAACAGGGGCTAAGTCCA |
| | | C |
| 298 | 586_Human_diMut_AT19TC_n1 | GGGGGAGGCTGCTGGTGATCATTAACCAAGGTCACCCCAGTTATCGGAGGAGCAAACAGGGGCTAAGTCCA |
| | | C |
| 299 | 587_Human_diMut_AT19TG_n1 | GGGGGAGGCTGCTGGTGATGATTAACCAAGGTCACCCCAGTTATCGGAGGAGCAAACAGGGGCTAAGTCCA |
| | | C |
| 300 | 589_Human_diMut_TA20AG_n1 | GGGGGAGGCTGCTGGTGAAAGTTAACCAAGGTCACCCCAGTTATCGGAGGAGCAAACAGGGGCTAAGTCCA |
| | | C |
| 301 | 591_Human_diMut_TA20CC_n1 | GGGGGAGGCTGCTGGTGAACCTTAACCAAGGTCACCCCAGTTATCGGAGGAGCAAACAGGGGCTAAGTCCA |
| | | C |
| 302 | 592_Human_diMut_TA20CG_n1 | GGGGGAGGCTGCTGGTGAACGTTAACCAAGGTCACCCCAGTTATCGGAGGAGCAAACAGGGGCTAAGTCCA |
| | | C |
| 303 | 593_Human_diMut_TA20CT_n1 | GGGGGAGGCTGCTGGTGAACTTTAACCAAGGTCACCCCAGTTATCGGAGGAGCAAACAGGGGCTAAGTCCA |
| | | C |
| 304 | 596_Human_diMut_TA20GT_n1 | GGGGGAGGCTGCTGGTGAAGTTTAACCAAGGTCACCCCAGTTATCGGAGGAGCAAACAGGGGCTAAGTCCA |
| | | C |
| 305 | 597_Human_diMut_AT21CA_n1 | GGGGGAGGCTGCTGGTGAATCATAACCAAGGTCACCCCAGTTATCGGAGGAGCAAACAGGGGCTAAGTCCA |
| | | C |
| 306 | 601_Human_diMut_AT21GC_n1 | GGGGGAGGCTGCTGGTGAATGCTAACCAAGGTCACCCCAGTTATCGGAGGAGCAAACAGGGGCTAAGTCCA |
| | | C |
| 308 | 602_Human_diMut_AT21GG_n1 | GGGGGAGGCTGCTGGTGAATGGTAACCAAGGTCACCCCAGTTATCGGAGGAGCAAACAGGGGCTAAGTCCA |
| | | C |
| 309 | 604_Human_diMut_AT21TC_n1 | GGGGGAGGCTGCTGGTGAATTCTAACCAAGGTCACCCCAGTTATCGGAGGAGCAAACAGGGGCTAAGTCCA |
| | | C |
| 310 | 608_Human_diMut_TT22AG_n1 | GGGGGAGGCTGCTGGTGAATAAGAACCAAGGTCACCCCAGTTATCGGAGGAGCAAACAGGGGCTAAGTCCA |
| | | C |
| 311 | 614_Human_diMut_TT22GG_n1 | GGGGGAGGCTGCTGGTGAATAGGAACCAAGGTCACCCCAGTTATCGGAGGAGCAAACAGGGGCTAAGTCCA |
| | | C |
| 312 | 616_Human_diMut_TA23AG_n1 | GGGGGAGGCTGCTGGTGAATATAGACCAAGGTCACCCCAGTTATCGGAGGAGCAAACAGGGGCTAAGTCCA |
| | | C |
| 313 | 619_Human_diMut_TA23CG_n1 | GGGGGAGGCTGCTGGTGAATATCGACCAAGGTCACCCCAGTTATCGGAGGAGCAAACAGGGGCTAAGTCCA |
| | | C |
| 314 | 621_Human_diMut_TA23GC_n1 | GGGGGAGGCTGCTGGTGAATATGCACCAAGGTCACCCCAGTTATCGGAGGAGCAAACAGGGGCTAAGTCCA |
| | | C |
| 315 | 623_Human_diMut_TA23GT_n1 | GGGGGAGGCTGCTGGTGAATATGTACCAAGGTCACCCCAGTTATCGGAGGAGCAAACAGGGGCTAAGTCCA |
| | | C |
| 316 | 624_Human_diMut_AA24CC_n1 | GGGGGAGGCTGCTGGTGAATATTCCCCAAGGTCACCCCAGTTATCGGAGGAGCAAACAGGGGCTAAGTCCA |
| | | C |
| 317 | 629_Human_diMut_AA24GT_n1 | GGGGGAGGCTGCTGGTGAATATTGTCCAAGGTCACCCCAGTTATCGGAGGAGCAAACAGGGGCTAAGTCCA |
| | | C |
| 318 | 650_Human_diMut_CC26TT_n1 | GGGGGAGGCTGCTGGTGAATATTAATTAAGGTCACCCCAGTTATCGGAGGAGCAAACAGGGGCTAAGTCCA |
| | | C |
| 319 | 667_Human_diMut_AA28TG_n1 | GGGGGAGGCTGCTGGTGAATATTAACCTGGGTCACCCCAGTTATCGGAGGAGCAAACAGGGGCTAAGTCCA |
| | | C |
| 320 | 678_Human_diMut_GG30AA_n1 | GGGGGAGGCTGCTGGTGAATATTAACCAAAATCACCCCAGTTATCGGAGGAGCAAACAGGGGCTAAGTCCA |
| | | C |
| 321 | 679_Human_diMut_GG30AC_n1 | GGGGGAGGCTGCTGGTGAATATTAACCAAACTCACCCCAGTTATCGGAGGAGCAAACAGGGGCTAAGTCCA |
| | | C |
| 322 | 682_Human_diMut_GG30CC_n1 | GGGGGAGGCTGCTGGTGAATATTAACCAACCTCACCCCAGTTATCGGAGGAGCAAACAGGGGCTAAGTCCA |
| | | C |
| 323 | 688_Human_diMut_GT31AC_n1 | GGGGGAGGCTGCTGGTGAATATTAACCAAGACCACCCCAGTTATCGGAGGAGCAAACAGGGGCTAAGTCCA |
| | | C |
| 324 | 689_Human_diMut_GT31AG_n1 | GGGGGAGGCTGCTGGTGAATATTAACCAAGAGCACCCCAGTTATCGGAGGAGCAAACAGGGGCTAAGTCCA |
| | | C |
| 325 | 694_Human_diMut_GT31TC_n1 | GGGGGAGGCTGCTGGTGAATATTAACCAAGTCCACCCCAGTTATCGGAGGAGCAAACAGGGGCTAAGTCCA |
| | | C |
| 326 | 698_Human_diMut_TC32AT_n1 | GGGGGAGGCTGCTGGTGAATATTAACCAAGGATACCCCAGTTATCGGAGGAGCAAACAGGGGCTAAGTCCA |
| | | C |
| 327 | 704_Human_diMut_TC32GT_n1 | GGGGGAGGCTGCTGGTGAATATTAACCAAGGGTACCCCAGTTATCGGAGGAGCAAACAGGGGCTAAGTCCA |
| | | C |
| 328 | 705_Human_diMut_CA33AC_n1 | GGGGGAGGCTGCTGGTGAATATTAACCAAGGTACCCCCAGTTATCGGAGGAGCAAACAGGGGCTAAGTCCA |
| | | C |
| 329 | 706_Human_diMut_CA33AG_n1 | GGGGGAGGCTGCTGGTGAATATTAACCAAGGTAGCCCCAGTTATCGGAGGAGCAAACAGGGGCTAAGTCCA |
| | | C |
| 330 | 709_Human_diMut_CA33GG_n1 | GGGGGAGGCTGCTGGTGAATATTAACCAAGGTGGCCCCAGTTATCGGAGGAGCAAACAGGGGCTAAGTCCA |
| | | C |
| 331 | 720_Human_diMut_AC34TA_n1 | GGGGGAGGCTGCTGGTGAATATTAACCAAGGTCTACCCAGTTATCGGAGGAGCAAACAGGGGCTAAGTCCA |
| | | C |
| 332 | 723_Human_diMut_CC35AA_n1 | GGGGGAGGCTGCTGGTGAATATTAACCAAGGTCAAACCAGTTATCGGAGGAGCAAACAGGGGCTAAGTCCA |
| | | C |
| 323 | 728_Human_diMut_CC35GT_n1 | GGGGGAGGCTGCTGGTGAATATTAACCAAGGTCAGTCCAGTTATCGGAGGAGCAAACAGGGGCTAAGTCCA |
| | | C |
| 324 | 733_Human_diMut_CC36AG_n1 | GGGGGAGGCTGCTGGTGAATATTAACCAAGGTCACAGCAGTTATCGGAGGAGCAAACAGGGGCTAAGTCCA |
| | | C |
| 325 | 734_Human_diMut_CC36AT_n1 | GGGGGAGGCTGCTGGTGAATATTAACCAAGGTCACATCAGTTATCGGAGGAGCAAACAGGGGCTAAGTCCA |
| | | C |
| 326 | 736_Human_diMut_CC36GG_n1 | GGGGGAGGCTGCTGGTGAATATTAACCAAGGTCACGGCAGTTATCGGAGGAGCAAACAGGGGCTAAGTCCA |
| | | C |
| 327 | 737_Human_diMut_CC36GT_n1 | GGGGGAGGCTGCTGGTGAATATTAACCAAGGTCACGTCAGTTATCGGAGGAGCAAACAGGGGCTAAGTCCA |
| | | C |
| 328 | 738_Human_diMut_CC36TA_n1 | GGGGGAGGCTGCTGGTGAATATTAACCAAGGTCACTACAGTTATCGGAGGAGCAAACAGGGGCTAAGTCCA |
| | | C |
| 329 | 739_Human_diMut_CC36TG_n1 | GGGGGAGGCTGCTGGTGAATATTAACCAAGGTCACTGCAGTTATCGGAGGAGCAAACAGGGGCTAAGTCCA |
| | | C |
| 340 | 740_Human_diMut_CC36TT_n1 | GGGGGAGGCTGCTGGTGAATATTAACCAAGGTCACTTCAGITATCGGAGGAGCAAACAGGGGCTAAGTCCA |
| | | C |
| 341 | 741_Human_diMut_CC37AA_n1 | GGGGGAGGCTGCTGGTGAATATTAACCAAGGTCACCAAAGTTATCGGAGGAGCAAACAGGGGCTAAGTCCA |
| | | C |
| 342 | 743_Human_diMut_CC37AT_n1 | GGGGGAGGCTGCTGGTGAATATTAACCAAGGTCACCATAGTTATCGGAGGAGCAAACAGGGGCTAAGTCCA |
| | | C |
| 343 | 746_Human_diMut_CC37GT_n1 | GGGGGAGGCTGCTGGTGAATATTAACCAAGGTCACCGTAGTTATCGGAGGAGCAAACAGGGGCTAAGTCCA |
| | | C |
| 344 | 747_Human_diMut_CC37TA_n1 | GGGGGAGGCTGCTGGTGAATATTAACCAAGGTCACCTAAGTTATCGGAGGAGCAAACAGGGGCTAAGTCCA |
| | | C |
| 345 | 748_Human_diMut_CC37TG_n1 | GGGGGAGGCTGCTGGTGAATATTAACCAAGGTCACCTGAGTTATCGGAGGAGCAAACAGGGGCTAAGTCCA |
| | | C |
| 346 | 750_Human_diMut_CA38AC_n1 | GGGGGAGGCTGCTGGTGAATATTAACCAAGGTCACCCACGTTATCGGAGGAGCAAACAGGGGCTAAGTCCA |
| | | C |
| 347 | 752_Human_diMut_CA38AT_n1 | GGGGGAGGCTGCTGGTGAATATTAACCAAGGTCACCCATGTTATCGGAGGAGCAAACAGGGGCTAAGTCCA |
| | | C |
| 348 | 753_Human_diMut_CA38GC_n1 | GGGGGAGGCTGCTGGTGAATATTAACCAAGGTCACCCGCGTTATCGGAGGAGCAAACAGGGGCTAAGTCCA |
| | | C |
| 349 | 754_Human_diMut_CA38GG_n1 | GGGGGAGGCTGCTGGTGAATATTAACCAAGGTCACCCGGGTTATCGGAGGAGCAAACAGGGGCTAAGTCCA |
| | | C |
| 350 | 755_Human_diMut_CA38GT_n1 | GGGGGAGGCTGCTGGTGAATATTAACCAAGGTCACCCGTGTTATCGGAGGAGCAAACAGGGGCTAAGTCCA |
| | | C |
| 351 | 756_Human_diMut_CA38TC_n1 | GGGGGAGGCTGCTGGTGAATATTAACCAAGGTCACCCTCGTTATCGGAGGAGCAAACAGGGGCTAAGTCCA |
| | | C |
| 352 | 757_Human_diMut_CA38TG_n1 | GGGGGAGGCTGCTGGTGAATATTAACCAAGGTCACCCTGGTTATCGGAGGAGCAAACAGGGGCTAAGTCCA |
| | | C |
| 353 | 758_Human_diMut_CA38TT_n1 | GGGGGAGGCTGCTGGTGAATATTAACCAAGGTCACCCTTGTTATCGGAGGAGCAAACAGGGGCTAAGTCCA |
| | | C |
| 354 | 759_Human_diMut_AG39CA_n1 | GGGGGAGGCTGCTGGTGAATATTAACCAAGGTCACCCCCATTATCGGAGGAGCAAACAGGGGCTAAGTCCA |
| | | C |
| 355 | 765_Human_diMut_AG39TA_n1 | GGGGGAGGCTGCTGGTGAATATTAACCAAGGTCACCCCTATTATCGGAGGAGCAAACAGGGGCTAAGTCCA |
| | | C |
| 356 | 766_Human_diMut_AG39TC_n1 | GGGGGAGGCTGCTGGTGAATATTAACCAAGGTCACCCCTCTTATCGGAGGAGCAAACAGGGGCTAAGTCCA |
| | | C |
| 357 | 767_Human_diMut_AG39TT_n1 | GGGGGAGGCTGCTGGTGAATATTAACCAAGGTCACCCCTTTTATCGGAGGAGCAAACAGGGGCTAAGTCCA |
| | | C |
| 358 | 772_Human_diMut_GT40CC_n1 | GGGGGAGGCTGCTGGTGAATATTAACCAAGGTCACCCCACCTATCGGAGGAGCAAACAGGGGCTAAGTCCA |
| | | C |
| 359 | 776_Human_diMut_GT40TG_n1 | GGGGGAGGCTGCTGGTGAATATTAACCAAGGTCACCCCATGTATCGGAGGAGCAAACAGGGGCTAAGTCCA |
| | | C |
| 360 | 777_Human_diMut_TT41AA_n1 | GGGGGAGGCTGCTGGTGAATATTAACCAAGGTCACCCCAGAAATCGGAGGAGCAAACAGGGGCTAAGTCCA |
| | | C |
| 361 | 781_Human_diMut_TT41CC_n1 | GGGGGAGGCTGCTGGTGAATATTAACCAAGGTCACCCCAGCCATCGGAGGAGCAAACAGGGGCTAAGTCCA |
| | | C |
| 362 | 787_Human_diMut_TA42AG_n1 | GGGGGAGGCTGCTGGTGAATATTAACCAAGGTCACCCCAGTAGTCGGAGGAGCAAACAGGGGCTAAGTCCA |
| | | C |
| 363 | 790_Human_diMut_TA42CG_n1 | GGGGGAGGCTGCTGGTGAATATTAACCAAGGTCACCCCAGTCGTCGGAGGAGCAAACAGGGGCTAAGTCCA |
| | | C |
| 364 | 794_Human_diMut_TA42GT_n1 | GGGGGAGGCTGCTGGTGAATATTAACCAAGGTCACCCCAGTGTTCGGAGGAGCAAACAGGGGCTAAGTCCA |
| | | C |
| 365 | 795_Human_diMut_AT43CA_n1 | GGGGGAGGCTGCTGGTGAATATTAACCAAGGTCACCCCAGTTCACGGAGGAGCAAACAGGGGCTAAGTCCA |
| | | C |
| 366 | 799_Human_diMut_AT43GC_n1 | GGGGGAGGCTGCTGGTGAATATTAACCAAGGTCACCCCAGTTGCCGGAGGAGCAAACAGGGGCTAAGTCCA |
| | | C |
| 367 | 802_Human_diMut_AT43TC_n1 | GGGGGAGGCTGCTGGTGAATATTAACCAAGGTCACCCCAGTTTCCGGAGGAGCAAACAGGGGCTAAGTCCA |
| | | C |
| 368 | 806_Human_diMut_TC44AT_n1 | GGGGGAGGCTGCTGGTGAATATTAACCAAGGTCACCCCAGTTAATGGAGGAGCAAACAGGGGCTAAGTCCA |
| | | C |
| 369 | 807_Human_diMut_TC44CA_n1 | GGGGGAGGCTGCTGGTGAATATTAACCAAGGTCACCCCAGTTACAGGAGGAGCAAACAGGGGCTAAGTCCA |
| | | C |
| 370 | 811_Human_diMut_TC44GG_n1 | GGGGGAGGCTGCTGGTGAATATTAACCAAGGTCACCCCAGTTAGGGGAGGAGCAAACAGGGGCTAAGTCCA |
| | | C |
| 371 | 815_Human_diMut_CG45AT_n1 | GGGGGAGGCTGCTGGTGAATATTAACCAAGGTCACCCCAGTTATATGAGGAGCAAACAGGGGCTAAGTCCA |
| | | C |
| 372 | 818_Human_diMut_CG45GT_n1 | GGGGGAGGCTGCTGGTGAATATTAACCAAGGTCACCCCAGTTATGTGAGGAGCAAACAGGGGCTAAGTCCA |
| | | C |
| 373 | 821_Human_diMut_CG45TT_n1 | GGGGGAGGCTGCTGGTGAATATTAACCAAGGTCACCCCAGTTATTTGAGGAGCAAACAGGGGCTAAGTCCA |
| | | C |
| 374 | 822_Human_diMut_GG46AA_n1 | GGGGGAGGCTGCTGGTGAATATTAACCAAGGTCACCCCAGTTATCAAAGGAGCAAACAGGGGCTAAGTCCA |
| | | C |
| 375 | 824_Human_diMut_GG46AT_n1 | GGGGGAGGCTGCTGGTGAATATTAACCAAGGTCACCCCAGTTATCATAGGAGCAAACAGGGGCTAAGTCCA |
| | | C |
| 376 | 826_Human_diMut_GG46CC_n1 | GGGGGAGGCTGCTGGTGAATATTAACCAAGGTCACCCCAGTTATCCCAGGAGCAAACAGGGGCTAAGTCCA |
| | | C |
| 377 | 827_Human_diMut_GG46CT_n1 | GGGGGAGGCTGCTGGTGAATATTAACCAAGGTCACCCCAGTTATCCTAGGAGCAAACAGGGGCTAAGTCCA |
| | | C |
| 378 | 828_Human_diMut_GG46TA_n1 | GGGGGAGGCTGCTGGTGAATATTAACCAAGGTCACCCCAGTTATCTAAGGAGCAAACAGGGGCTAAGTCCA |
| | | C |
| 379 | 830_Human_diMut_GG46TT_n1 | GGGGGAGGCTGCTGGTGAATATTAACCAAGGTCACCCCAGTTATCTTAGGAGCAAACAGGGGCTAAGTCCA |
| | | C |
| 380 | 832_Human_diMut_GA47AG_n1 | GGGGGAGGCTGCTGGTGAATATTAACCAAGGTCACCCCAGTTATCGAGGGAGCAAACAGGGGCTAAGTCCA |
| | | C |
| 381 | 833_Human_diMut_GA47AT_n1 | GGGGGAGGCTGCTGGTGAATATTAACCAAGGTCACCCCAGTTATCGATGGAGCAAACAGGGGCTAAGTCCA |
| | | C |
| 382 | 834_Human_diMut_GA47CC_n1 | GGGGGAGGCTGCTGGTGAATATTAACCAAGGTCACCCCAGTTATCGCCGGAGCAAACAGGGGCTAAGTCCA |
| | | C |
| 383 | 836_Human_diMut_GA47CT_n1 | GGGGGAGGCTGCTGGTGAATATTAACCAAGGTCACCCCAGTTATCGCTGGAGCAAACAGGGGCTAAGTCCA |
| | | C |
| 384 | 839_Human_diMut_GA47TT_n1 | GGGGGAGGCTGCTGGTGAATATTAACCAAGGTCACCCCAGTTATCGTTGGAGCAAACAGGGGCTAAGTCCA |
| | | C |
| 385 | 840_Human_diMut_AG48CA_n1 | GGGGGAGGCTGCTGGTGAATATTAACCAAGGTCACCCCAGTTATCGGCAGAGCAAACAGGGGCTAAGTCCA |
| | | C |
| 386 | 842_Human_diMut_AG48CT_n1 | GGGGGAGGCTGCTGGTGAATATTAACCAAGGTCACCCCAGTTATCGGCTGAGCAAACAGGGGCTAAGTCCA |
| | | C |
| 387 | 843_Human_diMut_AG48GA_n1 | GGGGGAGGCTGCTGGTGAATATTAACCAAGGTCACCCCAGTTATCGGGAGAGCAAACAGGGGCTAAGTCCA |
| | | C |
| 388 | 845_Human_diMut_AG48GT_n1 | GGGGGAGGCTGCTGGTGAATATTAACCAAGGTCACCCCAGTTATCGGGTGAGCAAACAGGGGCTAAGTCCA |
| | | C |
| 389 | 846_Human_diMut_AG48TA_n1 | GGGGGAGGCTGCTGGTGAATATTAACCAAGGTCACCCCAGTTATCGGTAGAGCAAACAGGGGCTAAGTCCA |
| | | C |
| 390 | 848_Human_diMut_AG48TT_n1 | GGGGGAGGCTGCTGGTGAATATTAACCAAGGTCACCCCAGTTATCGGTTGAGCAAACAGGGGCTAAGTCCA |
| | | C |
| 391 | 849_Human_diMut_GG49AA_n1 | GGGGGAGGCTGCTGGTGAATATTAACCAAGGTCACCCCAGTTATCGGAAAAGCAAACAGGGGCTAAGTCCA |
| | | C |
| 392 | 850_Human_diMut_GG49AC_n1 | GGGGGAGGCTGCTGGTGAATATTAACCAAGGTCACCCCAGTTATCGGAACAGCAAACAGGGGCTAAGTCCA |
| | | C |
| 393 | 851_Human_diMut_GG49AT_n1 | GGGGGAGGCTGCTGGTGAATATTAACCAAGGTCACCCCAGTTATCGGAATAGCAAACAGGGGCTAAGTCCA |
| | | C |
| 394 | 852_Human_diMut_GG49CA_n1 | GGGGGAGGCTGCTGGTGAATATTAACCAAGGTCACCCCAGTTATCGGACAAGCAAACAGGGGCTAAGTCCA |
| | | C |
| 395 | 853_Human_diMut_GG49CC_n1 | GGGGGAGGCTGCTGGTGAATATTAACCAAGGTCACCCCAGTTATCGGACCAGCAAACAGGGGCTAAGTCCA |
| | | C |
| 396 | 854_Human_diMut_GG49CT_n1 | GGGGGAGGCTGCTGGTGAATATTAACCAAGGTCACCCCAGTTATCGGACTAGCAAACAGGGGCTAAGTCCA |
| | | C |
| 397 | 855_Human_diMut_GG49TA_n1 | GGGGGAGGCTGCTGGTGAATATTAACCAAGGTCACCCCAGTTATCGGATAAGCAAACAGGGGCTAAGTCCA |
| | | C |
| 398 | 856_Human_diMut_GG49TC_n1 | GGGGGAGGCTGCTGGTGAATATTAACCAAGGTCACCCCAGTTATCGGATCAGCAAACAGGGGCTAAGTCCA |
| | | C |
| 399 | 857_Human_diMut_GG49TT_n1 | GGGGGAGGCTGCTGGTGAATATTAACCAAGGTCACCCCAGTTATCGGATTAGCAAACAGGGGCTAAGTCCA |
| | | C |
| 400 | 859_Human_diMut_GA50AG_n1 | GGGGGAGGCTGCTGGTGAATATTAACCAAGGTCACCCCAGTTATCGGAGAGGCAAACAGGGGCTAAGTCCA |
| | | C |
| 401 | 866_Human_diMut_GA50TT_n1 | GGGGGAGGCTGCTGGTGAATATTAACCAAGGTCACCCCAGTTATCGGAGTTGCAAACAGGGGCTAAGTCCA |
| | | C |
| 402 | 867_Human_diMut_AG51CA_n1 | GGGGGAGGCTGCTGGTGAATATTAACCAAGGTCACCCCAGTTATCGGAGGCACAAACAGGGGCTAAGTCCA |
| | | C |
| 403 | 868_Human_diMut_AG51CC_n1 | GGGGGAGGCTGCTGGTGAATATTAACCAAGGTCACCCCAGTTATCGGAGGCCCAAACAGGGGCTAAGTCCA |
| | | C |
| 404 | 876_Human_diMut_GC52AA_n1 | GGGGGAGGCTGCTGGTGAATATTAACCAAGGTCACCCCAGTTATCGGAGGAAAAAACAGGGGCTAAGTCCA |
| | | C |
| 405 | 881_Human_diMut_GC52CT_n1 | GGGGGAGGCTGCTGGTGAATATTAACCAAGGTCACCCCAGTTATCGGAGGACTAAACAGGGGCTAAGTCCA |
| | | C |
| 406 | 885_Human_diMut_CA53AC_n1 | GGGGGAGGCTGCTGGTGAATATTAACCAAGGTCACCCCAGTTATCGGAGGAGACAACAGGGGCTAAGTCCA |
| | | C |
| 407 | 886_Human_diMut_CA53AG_n1 | GGGGGAGGCTGCTGGTGAATATTAACCAAGGTCACCCCAGTTATCGGAGGAGAGAACAGGGGCTAAGTCCA |
| | | C |
| 408 | 887_Human_diMut_CA53AT_n1 | GGGGGAGGCTGCTGGTGAATATTAACCAAGGTCACCCCAGTTATCGGAGGAGATAACAGGGGCTAAGTCCA |
| | | C |
| 409 | 891_Human_diMut_CA53TC_n1 | GGGGGAGGCTGCTGGTGAATATTAACCAAGGTCACCCCAGTTATCGGAGGAGTCAACAGGGGCTAAGTCCA |
| | | C |
| 410 | 892_Human_diMut_CA53TG_n1 | GGGGGAGGCTGCTGGTGAATATTAACCAAGGTCACCCCAGTTATCGGAGGAGTGAACAGGGGCTAAGTCCA |
| | | C |
| 411 | 898_Human_diMut_AA54GG_n1 | GGGGGAGGCTGCTGGTGAATATTAACCAAGGTCACCCCAGTTATCGGAGGAGCGGACAGGGGCTAAGTCCA |
| | | C |
| 412 | 900_Human_diMut_AA54TC_n1 | GGGGGAGGCTGCTGGTGAATATTAACCAAGGTCACCCCAGTTATCGGAGGAGCTCACAGGGGCTAAGTCCA |
| | | C |
| 413 | 906_Human_diMut_AA55GC_n1 | GGGGGAGGCTGCTGGTGAATATTAACCAAGGTCACCCCAGTTATCGGAGGAGCAGCCAGGGGCTAAGTCCA |
| | | C |
| 414 | 933_Human_diMut_AG58GA_n1 | GGGGGAGGCTGCTGGTGAATATTAACCAAGGTCACCCCAGTTATCGGAGGAGCAAACGAGGGCTAAGTCCA |
| | | C |
| 415 | 941_Human_diMut_GG59AT_n1 | GGGGGAGGCTGCTGGTGAATATTAACCAAGGTCACCCCAGTTATCGGAGGAGCAAACAATGGCTAAGTCCA |
| | | C |
| 416 | 943_Human_diMut_GG59CC_n1 | GGGGGAGGCTGCTGGTGAATATTAACCAAGGTCACCCCAGTTATCGGAGGAGCAAACACCGGCTAAGTCCA |
| | | C |
| 417 | 947_Human_diMut_GG59TT_n1 | GGGGGAGGCTGCTGGTGAATATTAACCAAGGTCACCCCAGTTATCGGAGGAGCAAACATTGGCTAAGTCCA |
| | | C |
| 418 | 950_Human_diMut_GG60AT_n1 | GGGGGAGGCTGCTGGTGAATATTAACCAAGGTCACCCCAGTTATCGGAGGAGCAAACAGATGCTAAGTCCA |
| | | C |
| 419 | 955_Human_diMut_GG60TC_n1 | GGGGGAGGCTGCTGGTGAATATTAACCAAGGTCACCCCAGTTATCGGAGGAGCAAACAGTCGCTAAGTCCA |
| | | C |
| 420 | 957_Human_diMut_GG61AA_n1 | GGGGGAGGCTGCTGGTGAATATTAACCAAGGTCACCCCAGTTATCGGAGGAGCAAACAGGAACTAAGTCCA |
| | | C |
| 421 | 958_Human_diMut_GG61AC_n1 | GGGGGAGGCTGCTGGTGAATATTAACCAAGGTCACCCCAGTTATCGGAGGAGCAAACAGGACCTAAGTCCA |
| | | C |
| 422 | 960_Human_diMut_GG61CA_n1 | GGGGGAGGCTGCTGGTGAATATTAACCAAGGTCACCCCAGTTATCGGAGGAGCAAACAGGCACTAAGTCCA |
| | | C |
| 423 | 964_Human_diMut_GG61TC_n1 | GGGGGAGGCTGCTGGTGAATATTAACCAAGGTCACCCCAGTTATCGGAGGAGCAAACAGGTCCTAAGTCCA |
| | | C |
| 424 | 965_Human_diMut_GG61TT_n1 | GGGGGAGGCTGCTGGTGAATATTAACCAAGGTCACCCCAGTTATCGGAGGAGCAAACAGGTTCTAAGTCCA |
| | | C |
| 425 | 968_Human_diMut_GC62AT_n1 | GGGGGAGGCTGCTGGTGAATATTAACCAAGGTCACCCCAGTTATCGGAGGAGCAAACAGGGATTAAGTCCA |
| | | C |
| 426 | 969_Human_diMut_GC62CA_n1 | GGGGGAGGCTGCTGGTGAATATTAACCAAGGTCACCCCAGTTATCGGAGGAGCAAACAGGGCATAAGTCCA |
| | | C |
| 427 | 980_Human_diMut_CT63GG_n1 | GGGGGAGGCTGCTGGTGAATATTAACCAAGGTCACCCCAGTTATCGGAGGAGCAAACAGGGGGGAAGTCCA |
| | | C |
| 428 | 981_Human_diMut_CT63TA_n1 | GGGGGAGGCTGCTGGTGAATATTAACCAAGGTCACCCCAGTTATCGGAGGAGCAAACAGGGGTAAAGTCCA |
| | | C |
| 429 | 983_Human_diMut_CT63TG_n1 | GGGGGAGGCTGCTGGTGAATATTAACCAAGGTCACCCCAGTTATCGGAGGAGCAAACAGGGGTGAAGTCCA |
| | | C |
| 430 | 985_Human_diMut_TA64AG_n1 | GGGGGAGGCTGCTGGTGAATATTAACCAAGGTCACCCCAGTTATCGGAGGAGCAAACAGGGGCAGAGTCCA |
| | | C |
| 431 | 986_Human_diMut_TA64AT_n1 | GGGGGAGGCTGCTGGTGAATATTAACCAAGGTCACCCCAGTTATCGGAGGAGCAAACAGGGGCATAGTCCA |
| | | C |
| 432 | 994_Human_diMut_AA65CG_n1 | GGGGGAGGCTGCTGGTGAATATTAACCAAGGTCACCCCAGTTATCGGAGGAGCAAACAGGGGCTCGGTCCA |
| | | C |
| 433 | 1022_Human_diMut_TC68AT_n1 | GGGGGAGGCTGCTGGTGAATATTAACCAAGGTCACCCCAGTTATCGGAGGAGCAAACAGGGGCTAAGATCA |
| | | C |
| 434 | 1023_Human_diMut_TC68CA_n1 | GGGGGAGGCTGCTGGTGAATATTAACCAAGGTCACCCCAGTTATCGGAGGAGCAAACAGGGGCTAAGCACA |
| | | C |
| 435 | 1028_Human_diMut_TC68GT_n1 | GGGGGAGGCTGCTGGTGAATATTAACCAAGGTCACCCCAGTTATCGGAGGAGCAAACAGGGGCTAAGGTCA |
| | | C |
| 436 | 1029_Human_diMut_CC69AA_n1 | GGGGGAGGCTGCTGGTGAATATTAACCAAGGTCACCCCAGTTATCGGAGGAGCAAACAGGGGCTAAGTAAA |
| | | C |
| 437 | 4267_Human_quadMut_1T_3A_8T_48T_n1 | TGAGGAGTCTGCTGGTGAATATTAACCAAGGTCACCCCAGTTATCGGTGGAGCAAACAGGGGCTAAGTCCA |
| | | C |
| 438 | 4268_Human_quadMut_1T_3A_8C_52T_n1 | TGAGGAGCCTGCTGGTGAATATTAACCAAGGTCACCCCAGTTATCGGAGGATCAAACAGGGGCTAAGTCCA |
| | | C |
| 439 | 4269_Human_quadMut_1A_3A_8A_62C_n1 | AGAGGAGACTGCTGGTGAATATTAACCAAGGTCACCCCAGTTATCGGAGGAGCAAACAGGGCCTAAGTCCA |
| | | C |
| 440 | 4272_Human_quadMut_1A_3T_14A_37T_n1 | AGTGGAGGCTGCTAGTGAATATTAACCAAGGTCACCTCAGTTATCGGAGGAGCAAACAGGGGCTAAGTCCA |
| | | C |
| 441 | 4282_Human_quadMut_1T_3A_35A_48G_n1 | TGAGGAGGCTGCTGGTGAATATTAACCAAGGTCAACCCAGTTATCGGGGGAGCAAACAGGGGCTAAGTCCA |
| | | C |
| 442 | 4284_Human_quadMut_1A_3T_35T_62A_n1 | AGTGGAGGCTGCTGGTGAATATTAACCAAGGTCATCCCAGTTATCGGAGGAGCAAACAGGGACTAAGTCCA |
| | | C |
| 443 | 4287_Human_quadMut_1A_3T_37A_46T_n1 | AGTGGAGGCTGCTGGTGAATATTAACCAAGGTCACCACAGTTATCTGAGGAGCAAACAGGGGCTAAGTCCA |
| | | C |
| 444 | 4288_Human_quadMut_1A_3T_37T_48T_n1 | AGTGGAGGCTGCTGGTGAATATTAACCAAGGTCACCTCAGTTATCGGTGGAGCAAACAGGGGCTAAGTCCA |
| | | C |
| 445 | 4289_Human_quadMut_1A_3A_37T_52T_n1 | AGAGGAGGCTGCTGGTGAATATTAACCAAGGTCACCTCAGTTATCGGAGGATCAAACAGGGGCTAAGTCCA |
| | | C |
| 446 | 4293_Human_quadMut_1A_3A_45T_48T_n1 | AGAGGAGGCTGCTGGTGAATATTAACCAAGGTCACCCCAGTTATTGGTGGAGCAAACAGGGGCTAAGTCCA |
| | | C |
| 447 | 4298_Human_quadMut_1T_3T_46T_52T_n1 | TGTGGAGGCTGCTGGTGAATATTAACCAAGGTCACCCCAGTTATCTGAGGATCAAACAGGGGCTAAGTCCA |
| | | C |
| 448 | 4299_Human_quadMut_1T_3T_46T_62A_n1 | TGTGGAGGCTGCTGGTGAATATTAACCAAGGTCACCCCAGTTATCTGAGGAGCAAACAGGGACTAAGTCCA |
| | | C |
| 449 | 4310_Human_quadMut_1T_8T_14T_46T_n1 | TGGGGAGTCTGCTTGTGAATATTAACCAAGGTCACCCCAGTTATCTGAGGAGCAAACAGGGGCTAAGTCCA |
| | | C |
| 450 | 4312_Human_quadMut_1T_8C_14T_52T_n1 | TGGGGAGCCTGCTTGTGAATATTAACCAAGGTCACCCCAGTTATCGGAGGATCAAACAGGGGCTAAGTCCA |
| | | C |
| 451 | 4313_Human_quadMut_1A_8T_14T_62T_n1 | AGGGGAGTCTGCTTGTGAATATTAACCAAGGTCACCCCAGTTATCGGAGGAGCAAACAGGGTCTAAGTCCA |
| | | C |
| 452 | 4314_Human_quadMut_1A_8C_14A_72A_n1 | AGGGGAGCCTGCTAGTGAATATTAACCAAGGTCACCCCAGTTATCGGAGGAGCAAACAGGGGCTAAGTCCA |
| | | A |
| 453 | 4315_Human_quadMut_1A_8C_35T_37A_n1 | AGGGGAGCCTGCTGGTGAATATTAACCAAGGTCATCACAGTTATCGGAGGAGCAAACAGGGGCTAAGTCCA |
| | | C |
| 454 | 4317_Human_quadMut_1A_8A_35T_46A_n1 | AGGGGAGACTGCTGGTGAATATTAACCAAGGTCATCCCAGTTATCAGAGGAGCAAACAGGGGCTAAGTCCA |
| | | C |
| 455 | 4318_Human_quadMut_1T_8C_35G_48G_n1 | TGGGGAGCCTGCTGGTGAATATTAACCAAGGTCAGCCCAGTTATCGGGGGAGCAAACAGGGGCTAAGTCCA |
| | | C |
| 456 | 4320_Human_quadMut_1T_8A_35A_62C_n1 | TGGGGAGACTGCTGGTGAATATTAACCAAGGTCAACCCAGTTATCGGAGGAGCAAACAGGGCCTAAGTCCA |
| | | C |
| 457 | 4323_Human_quadMut_1A_8A_37A_46A_n1 | AGGGGAGACTGCTGGTGAATATTAACCAAGGTCACCACAGTTATCAGAGGAGCAAACAGGGGCTAAGTCCA |
| | | C |
| 458 | 4325_Human_quadMut_1T_8C_37T_52A_n1 | TGGGGAGCCTGCTGGTGAATATTAACCAAGGTCACCTCAGTTATCGGAGGAACAAACAGGGGCTAAGTCCA |
| | | C |
| 459 | 4340_Human_quadMut_1A_8T_52T_62T_n1 | AGGGGAGTCTGCTGGTGAATATTAACCAAGGTCACCCCAGTTATCGGAGGATCAAACAGGGTCTAAGTCCA |
| | | C |
| 460 | 4345_Human_quadMut_1T_14A_35G_46T_n1 | TGGGGAGGCTGCTAGTGAATATTAACCAAGGTCAGCCCAGTTATCTGAGGAGCAAACAGGGGCTAAGTCCA |
| | | C |
| 461 | 4353_Human_quadMut_1T_14T_37A_52T_n1 | TGGGGAGGCTGCTTGTGAATATTAACCAAGGTCACCACAGTTATCGGAGGATCAAACAGGGGCTAAGTCCA |
| | | C |
| 462 | 4371_Human_quadMut_1A_35T_37A_45T_n1 | AGGGGAGGCTGCTGGTGAATATTAACCAAGGTCATCACAGTTATTGGAGGAGCAAACAGGGGCTAAGTCCA |
| | | C |
| 463 | 4374_Human_quadMut_1A_35A_37A_52T_n1 | AGGGGAGGCTGCTGGTGAATATTAACCAAGGTCAACACAGTTATCGGAGGATCAAACAGGGGCTAAGTCCA |
| | | C |
| 464 | 4376_Human_quadMut_1A_35A_37A_72T_n1 | AGGGGAGGCTGCTGGTGAATATTAACCAAGGTCAACACAGTTATCGGAGGAGCAAACAGGGGCTAAGTCCA |
| | | T |
| 465 | 4377_Human_quadMut_1T_35G_45T_46T_n1 | TGGGGAGGCTGCTGGTGAATATTAACCAAGGTCAGCCCAGTTATTTGAGGAGCAAACAGGGGCTAAGTCCA |
| | | C |
| 466 | 4378_Human_quadMut_1T_35G_45T_48T_n1 | TGGGGAGGCTGCTGGTGAATATTAACCAAGGTCAGCCCAGTTATTGGTGGAGCAAACAGGGGCTAAGTCCA |
| | | C |
| 467 | 4379_Human_quadMut_1A_35G_45T_52C_n1 | AGGGGAGGCTGCTGGTGAATATTAACCAAGGTCAGCCCAGTTATTGGAGGACCAAACAGGGGCTAAGTCCA |
| | | C |
| 468 | 4381_Human_quadMut_1A_35T_45T_72A_n1 | AGGGGAGGCTGCTGGTGAATATTAACCAAGGTCATCCCAGTTATTGGAGGAGCAAACAGGGGCTAAGTCCA |
| | | A |
| 469 | 4382_Human_quadMut_1A_35G_46A_48G_n1 | AGGGGAGGCTGCTGGTGAATATTAACCAAGGTCAGCCCAGTTATCAGGGGAGCAAACAGGGGCTAAGTCCA |
| | | C |
| 470 | 4383_Human_quadMut_1A_35A_46T_52A_n1 | AGGGGAGGCTGCTGGTGAATATTAACCAAGGTCAACCCAGTTATCTGAGGAACAAACAGGGGCTAAGTCCA |
| | | C |
| 471 | 4384_Human_quadMut_1A_35T_46T_62C_n1 | AGGGGAGGCTGCTGGTGAATATTAACCAAGGTCATCCCAGTTATCTGAGGAGCAAACAGGGCCTAAGTCCA |
| | | C |
| 472 | 4387_Human_quadMut_1T_35T_48G_62T_n1 | TGGGGAGGCTGCTGGTGAATATTAACCAAGGTCATCCCAGTTATCGGGGGAGCAAACAGGGTCTAAGTCCA |
| | | C |
| 473 | 4388_Human_quadMut_1A_35T_48G_72A_n1 | AGGGGAGGCTGCTGGTGAATATTAACCAAGGTCATCCCAGTTATCGGGGGAGCAAACAGGGGCTAAGTCCA |
| | | A |
| 474 | 4394_Human_quadMut_1A_37A_45G_52T_n1 | AGGGGAGGCTGCTGGTGAATATTAACCAAGGTCACCACAGTTATGGGAGGATCAAACAGGGGCTAAGTCCA |
| | | C |
| 475 | 4395_Human_quadMut_1T_37T_45G_62A_n1 | TGGGGAGGCTGCTGGTGAATATTAACCAAGGTCACCTCAGTTATGGGAGGAGCAAACAGGGACTAAGTCCA |
| | | C |
| 476 | 4396_Human_quadMut_1A_37T_45G_72A_n1 | AGGGGAGGCTGCTGGTGAATATTAACCAAGGTCACCTCAGTTATGGGAGGAGCAAACAGGGGCTAAGTCCA |
| | | A |
| 477 | 4398_Human_quadMut_1T_37A_46A_52C_n1 | TGGGGAGGCTGCTGGTGAATATTAACCAAGGTCACCACAGTTATCAGAGGACCAAACAGGGGCTAAGTCCA |
| | | C |
| 478 | 4401_Human_quadMut_1A_37A_48G_52C_n1 | AGGGGAGGCTGCTGGTGAATATTAACCAAGGTCACCACAGTTATCGGGGGACCAAACAGGGGCTAAGTCCA |
| | | C |
| 479 | 4402_Human_quadMut_1T_37T_48G_62T_n1 | TGGGGAGGCTGCTGGTGAATATTAACCAAGGTCACCTCAGTTATCGGGGGAGCAAACAGGGTCTAAGTCCA |
| | | C |
| 480 | 4405_Human_quadMut_1A_37A_52A_72T_n1 | AGGGGAGGCTGCTGGTGAATATTAACCAAGGTCACCACAGTTATCGGAGGAACAAACAGGGGCTAAGTCCA |
| | | T |
| 481 | 4407_Human_quadMut_1T_45G_46T_48G_n1 | TGGGGAGGCTGCTGGTGAATATTAACCAAGGTCACCCCAGTTATGTGGGGAGCAAACAGGGGCTAAGTCCA |
| | | C |
| 482 | 4410_Human_quadMut_1T_45G_46A_72A_n1 | TGGGGAGGCTGCTGGTGAATATTAACCAAGGTCACCCCAGTTATGAGAGGAGCAAACAGGGGCTAAGTCCA |
| | | A |
| 483 | 4416_Human_quadMut_1T_45T_62C_72A_n1 | TGGGGAGGCTGCTGGTGAATATTAACCAAGGTCACCCCAGTTATTGGAGGAGCAAACAGGGCCTAAGTCCA |
| | | A |
| 484 | 4417_Human_quadMut_1T_46A_48T_52C_n1 | TGGGGAGGCTGCTGGTGAATATTAACCAAGGTCACCCCAGTTATCAGTGGACCAAACAGGGGCTAAGTCCA |
| | | C |
| 485 | 4418_Human_quadMut_1T_46A_48T_62A_n1 | TGGGGAGGCTGCTGGTGAATATTAACCAAGGTCACCCCAGTTATCAGTGGAGCAAACAGGGACTAAGTCCA |
| | | C |
| 486 | 4419_Human_quadMut_1T_46A_48T_72A_n1 | TGGGGAGGCTGCTGGTGAATATTAACCAAGGTCACCCCAGTTATCAGTGGAGCAAACAGGGGCTAAGTCCA |
| | | A |
| 487 | 4423_Human_quadMut_1T_48G_52A_62T_n1 | TGGGGAGGCTGCTGGTGAATATTAACCAAGGTCACCCCAGTTATCGGGGGAACAAACAGGGTCTAAGTCCA |
| | | C |
| 488 | 4426_Human_quadMut_1T_52T_62C_72A_n1 | TGGGGAGGCTGCTGGTGAATATTAACCAAGGTCACCCCAGTTATCGGAGGATCAAACAGGGCCTAAGTCCA |
| | | A |
| 489 | 4435_Human_quadMut_3A_8A_35G_37T_n1 | GGAGGAGACTGCTGGTGAATATTAACCAAGGTCAGCTCAGTTATCGGAGGAGCAAACAGGGGCTAAGTCCA |
| | | C |
| 490 | 4439_Human_quadMut_3A_8T_35T_52T_n1 | GGAGGAGTCTGCTGGTGAATATTAACCAAGGTCATCCCAGTTATCGGAGGATCAAACAGGGGCTAAGTCCA |
| | | C |
| 491 | 4445_Human_quadMut_3A_8A_37A_52A_n1 | GGAGGAGACTGCTGGTGAATATTAACCAAGGTCACCACAGTTATCGGAGGAACAAACAGGGGCTAAGTCCA |
| | | C |
| 492 | 4448_Human_quadMut_3A_8A_45T_46A_n1 | GGAGGAGACTGCTGGTGAATATTAACCAAGGTCACCCCAGTTATTAGAGGAGCAAACAGGGGCTAAGTCCA |
| | | C |
| 493 | 4453_Human_quadMut_3T_8C_46T_48G_n1 | GGTGGAGCCTGCTGGTGAATATTAACCAAGGTCACCCCAGTTATCTGGGGAGCAAACAGGGGCTAAGTCCA |
| | | C |
| 494 | 4455_Human_quadMut_3A_8C_46A_62T_n1 | GGAGGAGCCTGCTGGTGAATATTAACCAAGGTCACCCCAGTTATCAGAGGAGCAAACAGGGTCTAAGTCCA |
| | | C |
| 495 | 4456_Human_quadMut_3T_8T_46A_72A_n1 | GGTGGAGTCTGCTGGTGAATATTAACCAAGGTCACCCCAGTTATCAGAGGAGCAAACAGGGGCTAAGTCCA |
| | | A |
| 496 | 4457_Human_quadMut_3T_8A_48G_52A_n1 | GGTGGAGACTGCTGGTGAATATTAACCAAGGTCACCCCAGTTATCGGGGGAACAAACAGGGGCTAAGTCCA |
| | | C |
| 497 | 4460_Human_quadMut_3T_8A_52C_62T_n1 | GGTGGAGACTGCTGGTGAATATTAACCAAGGTCACCCCAGTTATCGGAGGACCAAACAGGGTCTAAGTCCA |
| | | C |
| 498 | 4462_Human_quadMut_3T_8T_62T_72T_n1 | GGTGGAGTCTGCTGGTGAATATTAACCAAGGTCACCCCAGTTATCGGAGGAGCAAACAGGGTCTAAGTCCA |
| | | T |
| 499 | 4467_Human_quadMut_3T_14T_35G_52T_n1 | GGTGGAGGCTGCTTGTGAATATTAACCAAGGTCAGCCCAGTTATCGGAGGATCAAACAGGGGCTAAGTCCA |
| | | C |
| 500 | 4471_Human_quadMut_3T_14A_37A_46A_n1 | GGTGGAGGCTGCTAGTGAATATTAACCAAGGTCACCACAGTTATCAGAGGAGCAAACAGGGGCTAAGTCCA |
| | | C |
| 501 | 4481_Human_quadMut_3A_14T_46T_48T_n1 | GGAGGAGGCTGCTTGTGAATATTAACCAAGGTCACCCCAGTTATCTGTGGAGCAAACAGGGGCTAAGTCCA |
| | | C |
| 502 | 4482_Human_quadMut_3A_14T_46T_52C_n1 | GGAGGAGGCTGCTTGTGAATATTAACCAAGGTCACCCCAGTTATCTGAGGACCAAACAGGGGCTAAGTCCA |
| | | C |
| 503 | 4487_Human_quadMut_3T_14T_48G_72A_n1 | GGTGGAGGCTGCTTGTGAATATTAACCAAGGTCACCCCAGTTATCGGGGGAGCAAACAGGGGCTAAGTCCA |
| | | A |
| 504 | 4488_Human_quadMut_3A_14A_52C_62T_n1 | GGAGGAGGCTGCTAGTGAATATTAACCAAGGTCACCCCAGTTATCGGAGGACCAAACAGGGTCTAAGTCCA |
| | | C |
| 505 | 4492_Human_quadMut_3A_35T_37T_46T_n1 | GGAGGAGGCTGCTGGTGAATATTAACCAAGGTCATCTCAGTTATCTGAGGAGCAAACAGGGGCTAAGTCCA |
| | | C |
| 506 | 4493_Human_quadMut_3T_35T_37T_48G_n1 | GGTGGAGGCTGCTGGTGAATATTAACCAAGGTCATCTCAGTTATCGGGGGAGCAAACAGGGGCTAAGTCCA |
| | | C |
| 507 | 4494_Human_quadMut_3T_35A_37T_52C_n1 | GGTGGAGGCTGCTGGTGAATATTAACCAAGGTCAACTCAGTTATCGGAGGACCAAACAGGGGCTAAGTCCA |
| | | C |
| 508 | 4499_Human_quadMut_3T_35T_45T_52A_n1 | GGTGGAGGCTGCTGGTGAATATTAACCAAGGTCATCCCAGTTATTGGAGGAACAAACAGGGGCTAAGTCCA |
| | | C |
| 509 | 4502_Human_quadMut_3A_35G_46A_48G_n1 | GGAGGAGGCTGCTGGTGAATATTAACCAAGGTCAGCCCAGTTATCAGGGGAGCAAACAGGGGCTAAGTCCA |
| | | C |
| 510 | 4503_Human_quadMut_3T_35T_46T_52A_n1 | GGTGGAGGCTGCTGGTGAATATTAACCAAGGTCATCCCAGTTATCTGAGGAACAAACAGGGGCTAAGTCCA |
| | | C |
| 511 | 4506_Human_quadMut_3T_35G_48T_52T_n1 | GGTGGAGGCTGCTGGTGAATATTAACCAAGGTCAGCCCAGTTATCGGTGGATCAAACAGGGGCTAAGTCCA |
| | | C |
| 512 | 4507_Human_quadMut_3A_35A_48T_62T_n1 | GGAGGAGGCTGCTGGTGAATATTAACCAAGGTCAACCCAGTTATCGGTGGAGCAAACAGGGTCTAAGTCCA |
| | | C |
| 513 | 4509_Human_quadMut_3T_35T_52A_62T_n1 | GGTGGAGGCTGCTGGTGAATATTAACCAAGGTCATCCCAGTTATCGGAGGAACAAACAGGGTCTAAGTCCA |
| | | C |
| 514 | 4513_Human_quadMut_3A_37A_45T_48T_n1 | GGAGGAGGCTGCTGGTGAATATTAACCAAGGTCACCACAGTTATTGGTGGAGCAAACAGGGGCTAAGTCCA |
| | | C |
| 515 | 4519_Human_quadMut_3T_37T_46A_62A_n1 | GGTGGAGGCTGCTGGTGAATATTAACCAAGGTCACCTCAGTTATCAGAGGAGCAAACAGGGACTAAGTCCA |
| | | C |
| 516 | 4522_Human_quadMut_3A_37T_48T_62T_n1 | GGAGGAGGCTGCTGGTGAATATTAACCAAGGTCACCTCAGTTATCGGTGGAGCAAACAGGGTCTAAGTCCA |
| | | C |
| 517 | 4529_Human_quadMut_3T_45T_46T_62C_n1 | GGTGGAGGCTGCTGGTGAATATTAACCAAGGTCACCCCAGTTATTTGAGGAGCAAACAGGGCCTAAGTCCA |
| | | C |
| 518 | 4533_Human_quadMut_3A_45G_48G_72A_n1 | GGAGGAGGCTGCTGGTGAATATTAACCAAGGTCACCCCAGTTATGGGGGGAGCAAACAGGGGCTAAGTCCA |
| | | A |
| 519 | 4537_Human_quadMut_3A_46T_48T_52T_n1 | GGAGGAGGCTGCTGGTGAATATTAACCAAGGTCACCCCAGTTATCTGTGGATCAAACAGGGGCTAAGTCCA |
| | | C |
| 520 | 4539_Human_quadMut_3A_46T_48G_72G_n1 | GGAGGAGGCTGCTGGTGAATATTAACCAAGGTCACCCCAGTTATCTGGGGAGCAAACAGGGGCTAAGTCCA |
| | | G |
| 521 | 4541_Human_quadMut_3A_46T_52T_72A_n1 | GGAGGAGGCTGCTGGTGAATATTAACCAAGGTCACCCCAGTTATCTGAGGATCAAACAGGGGCTAAGTCCA |
| | | A |
| 522 | 4543_Human_quadMut_3T_48T_52A_62T_n1 | GGTGGAGGCTGCTGGTGAATATTAACCAAGGTCACCCCAGTTATCGGTGGAACAAACAGGGTCTAAGTCCA |
| | | C |
| 523 | 4545_Human_quadMut_3A_48G_62T_72A_n1 | GGAGGAGGCTGCTGGTGAATATTAACCAAGGTCACCCCAGTTATCGGGGGAGCAAACAGGGTCTAAGTCCA |
| | | A |
| 524 | 4546_Human_quadMut_3T_52T_62T_72G_n1 | GGTGGAGGCTGCTGGTGAATATTAACCAAGGTCACCCCAGTTATCGGAGGATCAAACAGGGTCTAAGTCCA |
| | | G |
| 525 | 4549_Human_quadMut_8C_14T_35T_46T_n1 | GGGGGAGCCTGCTTGTGAATATTAACCAAGGTCATCCCAGTTATCTGAGGAGCAAACAGGGGCTAAGTCCA |
| | | C |
| 526 | 4551_Human_quadMut_8T_14A_35T_52T_n1 | GGGGGAGTCTGCTAGTGAATATTAACCAAGGTCATCCCAGTTATCGGAGGATCAAACAGGGGCTAAGTCCA |
| | | C |
| 527 | 4557_Human_quadMut_8A_14A_37T_52C_n1 | GGGGGAGACTGCTAGTGAATATTAACCAAGGTCACCTCAGTTATCGGAGGACCAAACAGGGGCTAAGTCCA |
| | | C |
| 528 | 4562_Human_quadMut_8A_14T_45G_52T_n1 | GGGGGAGACTGCTTGTGAATATTAACCAAGGTCACCCCAGTTATGGGAGGATCAAACAGGGGCTAAGTCCA |
| | | C |
| 529 | 4563_Human_quadMut_8C_14A_45T_62T_n1 | GGGGGAGCCTGCTAGTGAATATTAACCAAGGTCACCCCAGTTATTGGAGGAGCAAACAGGGTCTAAGTCCA |
| | | C |
| 530 | 4566_Human_quadMut_8T_14A_46A_52A_n1 | GGGGGAGTCTGCTAGTGAATATTAACCAAGGTCACCCCAGTTATCAGAGGAACAAACAGGGGCTAAGTCCA |
| | | C |
| 531 | 4569_Human_quadMut_8A_14A_48T_52A_n1 | GGGGGAGACTGCTAGTGAATATTAACCAAGGTCACCCCAGTTATCGGTGGAACAAACAGGGGCTAAGTCCA |
| | | C |
| 532 | 4576_Human_quadMut_8C_35A_37T_46T_n1 | GGGGGAGCCTGCTGGTGAATATTAACCAAGGTCAACTCAGTTATCTGAGGAGCAAACAGGGGCTAAGTCCA |
| | | C |
| 533 | 4579_Human_quadMut_8C_35G_37A_62A_n1 | GGGGGAGCCTGCTGGTGAATATTAACCAAGGTCAGCACAGTTATCGGAGGAGCAAACAGGGACTAAGTCCA |
| | | C |
| 534 | 4580_Human_quadMut_8C_35A_37A_72A_n1 | GGGGGAGCCTGCTGGTGAATATTAACCAAGGTCAACACAGTTATCGGAGGAGCAAACAGGGGCTAAGTCCA |
| | | A |
| 535 | 4587_Human_quadMut_8A_35G_46A_52T_n1 | GGGGGAGACTGCTGGTGAATATTAACCAAGGTCAGCCCAGTTATCAGAGGATCAAACAGGGGCTAAGTCCA |
| | | C |
| 536 | 4588_Human_quadMut_8A_35T_46A_62C_n1 | GGGGGAGACTGCTGGTGAATATTAACCAAGGTCATCCCAGTTATCAGAGGAGCAAACAGGGCCTAAGTCCA |
| | | C |
| 537 | 4590_Human_quadMut_8C_35G_48T_52A_n1 | GGGGGAGCCTGCTGGTGAATATTAACCAAGGTCAGCCCAGTTATCGGTGGAACAAACAGGGGCTAAGTCCA |
| | | C |
| 538 | 4592_Human_quadMut_8C_35G_48T_72A_n1 | GGGGGAGCCTGCTGGTGAATATTAACCAAGGTCAGCCCAGTTATCGGTGGAGCAAACAGGGGCTAAGTCCA |
| | | A |
| 539 | 4599_Human_quadMut_8A_37T_45G_62T_n1 | GGGGGAGACTGCTGGTGAATATTAACCAAGGTCACCTCAGTTATGGGAGGAGCAAACAGGGTCTAAGTCCA |
| | | C |
| 540 | 4600_Human_quadMut_8T_37T_45G_72T_n1 | GGGGGAGTCTGCTGGTGAATATTAACCAAGGTCACCTCAGTTATGGGAGGAGCAAACAGGGGCTAAGTCCA |
| | | T |
| 541 | 4601_Human_quadMut_8T_37T_46T_48T_n1 | GGGGGAGTCTGCTGGTGAATATTAACCAAGGTCACCTCAGTTATCTGTGGAGCAAACAGGGGCTAAGTCCA |
| | | C |
| 542 | 4607_Human_quadMut_8T_37A_48G_72T_n1 | GGGGGAGTCTGCTGGTGAATATTAACCAAGGTCACCACAGTTATCGGGGGAGCAAACAGGGGCTAAGTCCA |
| | | T |
| 543 | 4608_Human_quadMut_8C_37T_52C_62T_n1 | GGGGGAGCCTGCTGGTGAATATTAACCAAGGTCACCTCAGTTATCGGAGGACCAAACAGGGTCTAAGTCCA |
| | | C |
| 544 | 4609_Human_quadMut_8T_37T_52T_72G_n1 | GGGGGAGTCTGCTGGTGAATATTAACCAAGGTCACCTCAGTTATCGGAGGATCAAACAGGGGCTAAGTCCA |
| | | G |
| 545 | 4616_Human_quadMut_8A_45G_48T_62A_n1 | GGGGGAGACTGCTGGTGAATATTAACCAAGGTCACCCCAGTTATGGGTGGAGCAAACAGGGACTAAGTCCA |
| | | C |
| 546 | 4619_Human_quadMut_8T_45A_52T_72G_n1 | GGGGGAGTCTGCTGGTGAATATTAACCAAGGTCACCCCAGTTATAGGAGGATCAAACAGGGGCTAAGTCCA |
| | | G |
| 547 | 4620_Human_quadMut_8A_45A_62T_72A_n1 | GGGGGAGACTGCTGGTGAATATTAACCAAGGTCACCCCAGTTATAGGAGGAGCAAACAGGGTCTAAGTCCA |
| | | A |
| 548 | 4622_Human_quadMut_8C_46A_48T_62A_n1 | GGGGGAGCCTGCTGGTGAATATTAACCAAGGTCACCCCAGTTATCAGTGGAGCAAACAGGGACTAAGTCCA |
| | | C |
| 549 | 4623_Human_quadMut_8A_46T_48T_72A_n1 | GGGGGAGACTGCTGGTGAATATTAACCAAGGTCACCCCAGTTATCTGTGGAGCAAACAGGGGCTAAGTCCA |
| | | A |
| 550 | 4624_Human_quadMut_8A_46A_52T_62C_n1 | GGGGGAGACTGCTGGTGAATATTAACCAAGGTCACCCCAGTTATCAGAGGATCAAACAGGGCCTAAGTCCA |
| | | C |
| 551 | 4626_Human_quadMut_8A_46A_62C_72T_n1 | GGGGGAGACTGCTGGTGAATATTAACCAAGGTCACCCCAGTTATCAGAGGAGCAAACAGGGCCTAAGTCCA |
| | | T |
| 552 | 4628_Human_quadMut_8C_48G_52A_72T_n1 | GGGGGAGCCTGCTGGTGAATATTAACCAAGGTCACCCCAGTTATCGGGGGAACAAACAGGGGCTAAGTCCA |
| | | T |
| 553 | 4630_Human_quadMut_8C_52T_62T_72A_n1 | GGGGGAGCCTGCTGGTGAATATTAACCAAGGTCACCCCAGTTATCGGAGGATCAAACAGGGTCTAAGTCCA |
| | | A |
| 554 | 4632_Human_quadMut_14A_35G_37A_46A_n | GGGGGAGGCTGCTAGTGAATATTAACCAAGGTCAGCACAGTTATCAGAGGAGCAAACAGGGGCTAAGTCCA |
| | | C |
| 555 | 4633_Human_quadMut_14T_35A_37T_48G_n1 | GGGGGAGGCTGCTTGTGAATATTAACCAAGGTCAACTCAGTTATCGGGGGAGCAAACAGGGGCTAAGTCCA |
| | | C |
| 556 | 4634_Human_quadMut_14A_35A_37A_52T_n1 | GGGGGAGGCTGCTAGTGAATATTAACCAAGGTCAACACAGTTATCGGAGGATCAAACAGGGGCTAAGTCCA |
| | | C |
| 557 | 4635_Human_quadMut_14A_35G_37A_62A_n1 | GGGGGAGGCTGCTAGTGAATATTAACCAAGGTCAGCACAGTTATCGGAGGAGCAAACAGGGACTAAGTCCA |
| | | C |
| 558 | 4638_Human_quadMut_14A_35G_45T_48T_n1 | GGGGGAGGCTGCTAGTGAATATTAACCAAGGTCAGCCCAGTTATTGGTGGAGCAAACAGGGGCTAAGTCCA |
| | | C |
| 559 | 4642_Human_quadMut_14T_35A_46A_48G_n1 | GGGGGAGGCTGCTTGTGAATATTAACCAAGGTCAACCCAGTTATCAGGGGAGCAAACAGGGGCTAAGTCCA |
| | | C |
| 560 | 4643_Human_quadMut_14T_35T_46T_52A_n1 | GGGGGAGGCTGCTTGTGAATATTAACCAAGGTCATCCCAGTTATCTGAGGAACAAACAGGGGCTAAGTCCA |
| | | C |
| 561 | 4644_Human_quadMut_14A_35T_46A_62A_n1 | GGGGGAGGCTGCTAGTGAATATTAACCAAGGTCATCCCAGTTATCAGAGGAGCAAACAGGGACTAAGTCCA |
| | | C |
| 562 | 4647_Human_quadMut_14T_35T_48G_62C_n1 | GGGGGAGGCTGCTTGTGAATATTAACCAAGGTCATCCCAGTTATCGGGGGAGCAAACAGGGCCTAAGTCCA |
| | | C |
| 563 | 4649_Human_quadMut_14A_35A_52T_62T_n1 | GGGGGAGGCTGCTAGTGAATATTAACCAAGGTCAACCCAGTTATCGGAGGATCAAACAGGGTCTAAGTCCA |
| | | C |
| 564 | 4654_Human_quadMut_14T_37A_45T_52A_n1 | GGGGGAGGCTGCTTGTGAATATTAACCAAGGTCACCACAGTTATTGGAGGAACAAACAGGGGCTAAGTCCA |
| | | C |
| 565 | 4659_Human_quadMut_14A_37A_46A_62T_n1 | GGGGGAGGCTGCTAGTGAATATTAACCAAGGTCACCACAGTTATCAGAGGAGCAAACAGGGTCTAAGTCCA |
| | | C |
| 566 | 4660_Human_quadMut_14A_37A_46T_72A_n1 | GGGGGAGGCTGCTAGTGAATATTAACCAAGGTCACCACAGTTATCTGAGGAGCAAACAGGGGCTAAGTCCA |
| | | A |
| 567 | 4661_Human_quadMut_14T_37T_48G_52T_n1 | GGGGGAGGCTGCTTGTGAATATTAACCAAGGTCACCTCAGTTATCGGGGGATCAAACAGGGGCTAAGTCCA |
| | | C |
| 568 | 4663_Human_quadMut_14T_37A_48G_72G_n1 | GGGGGAGGCTGCTTGTGAATATTAACCAAGGTCACCACAGTTATCGGGGGAGCAAACAGGGGCTAAGTCCA |
| | | G |
| 569 | 4668_Human_quadMut_14T_45T_46T_52T_n1 | GGGGGAGGCTGCTTGTGAATATTAACCAAGGTCACCCCAGTTATTTGAGGATCAAACAGGGGCTAAGTCCA |
| | | C |
| 570 | 4669_Human_quadMut_14A_45G_46T_62A_n1 | GGGGGAGGCTGCTAGTGAATATTAACCAAGGTCACCCCAGTTATGTGAGGAGCAAACAGGGACTAAGTCCA |
| | | C |
| 571 | 4676_Human_quadMut_14A_45T_62A_72A_n1 | GGGGGAGGCTGCTAGTGAATATTAACCAAGGTCACCCCAGTTATTGGAGGAGCAAACAGGGACTAAGTCCA |
| | | A |
| 572 | 4678_Human_quadMut_14A_46T_48G_62C_n1 | GGGGGAGGCTGCTAGTGAATATTAACCAAGGTCACCCCAGTTATCTGGGGAGCAAACAGGGCCTAAGTCCA |
| | | C |
| 573 | 4682_Human_quadMut_14A_46A_62C_72A_n1 | GGGGGAGGCTGCTAGTGAATATTAACCAAGGTCACCCCAGTTATCAGAGGAGCAAACAGGGCCTAAGTCCA |
| | | A |
| 574 | 4683_Human_quadMut_14A_48G_52T_62A_n1 | GGGGGAGGCTGCTAGTGAATATTAACCAAGGTCACCCCAGTTATCGGGGGATCAAACAGGGACTAAGTCCA |
| | | C |
| 575 | 4692_Human_quadMut_35G_37T_46A_48G_n1 | GGGGGAGGCTGCTGGTGAATATTAACCAAGGTCAGCTCAGTTATCAGGGGAGCAAACAGGGGCTAAGTCCA |
| | | C |
| 576 | 4693_Human_quadMut_35A_37A_46T_52C_n1 | GGGGGAGGCTGCTGGTGAATATTAACCAAGGTCAACACAGTTATCTGAGGACCAAACAGGGGCTAAGTCCA |
| | | C |
| 577 | 4694_Human_quadMut_35T_37A_46T_62A_n1 | GGGGGAGGCTGCTGGTGAATATTAACCAAGGTCATCACAGTTATCTGAGGAGCAAACAGGGACTAAGTCCA |
| | | C |
| 578 | 4695_Human_quadMut_35A_37A_46A_72A_n1 | GGGGGAGGCTGCTGGTGAATATTAACCAAGGTCAACACAGTTATCAGAGGAGCAAACAGGGGCTAAGTCCA |
| | | A |
| 579 | 4696_Human_quadMut_35G_37T_48G_52T_n1 | GGGGGAGGCTGCTGGTGAATATTAACCAAGGTCAGCTCAGTTATCGGGGGATCAAACAGGGGCTAAGTCCA |
| | | C |
| 580 | 4697_Human_quadMut_35T_37A_48T_62T_n1 | GGGGGAGGCTGCTGGTGAATATTAACCAAGGTCATCACAGTTATCGGTGGAGCAAACAGGGTCTAAGTCCA |
| | | C |
| 581 | 4698_Human_quadMut_35A_37A_48G_72G_n1 | GGGGGAGGCTGCTGGTGAATATTAACCAAGGTCAACACAGTTATCGGGGGAGCAAACAGGGGCTAAGTCCA |
| | | G |
| 582 | 4699_Human_quadMut_35A_37A_52T_62C_n1 | GGGGGAGGCTGCTGGTGAATATTAACCAAGGTCAACACAGTTATCGGAGGATCAAACAGGGCCTAAGTCCA |
| | | C |
| 583 | 4700_Human_quadMut_35G_37T_52T_72A_n1 | GGGGGAGGCTGCTGGTGAATATTAACCAAGGTCAGCTCAGTTATCGGAGGATCAAACAGGGGCTAAGTCCA |
| | | A |
| 584 | 4702_Human_quadMut_35T_45T_46A_48G_n1 | GGGGGAGGCTGCTGGTGAATATTAACCAAGGTCATCCCAGTTATTAGGGGAGCAAACAGGGGCTAAGTCCA |
| | | C |
| 585 | 4704_Human_quadMut_35G_45T_46T_62C_n1 | GGGGGAGGCTGCTGGTGAATATTAACCAAGGTCAGCCCAGTTATTTGAGGAGCAAACAGGGCCTAAGTCCA |
| | | C |
| 586 | 4705_Human_quadMut_35T_45T_46T_72G_n1 | GGGGGAGGCTGCTGGTGAATATTAACCAAGGTCATCCCAGTTATTTGAGGAGCAAACAGGGGCTAAGTCCA |
| | | G |
| 587 | 4706_Human_quadMut_35A_45G_48T_52T_n1 | GGGGGAGGCTGCTGGTGAATATTAACCAAGGTCAACCCAGTTATGGGTGGATCAAACAGGGGCTAAGTCCA |
| | | C |
| 588 | 4709_Human_quadMut_35A_45A_52T_62T_n1 | GGGGGAGGCTGCTGGTGAATATTAACCAAGGTCAACCCAGTTATAGGAGGATCAAACAGGGTCTAAGTCCA |
| | | C |
| 589 | 4712_Human_quadMut_35T_46A_48G_52A_n1 | GGGGGAGGCTGCTGGTGAATATTAACCAAGGTCATCCCAGTTATCAGGGGAACAAACAGGGGCTAAGTCCA |
| | | C |
| 590 | 4714_Human_quadMut_35A_46T_48T_72T_n1 | GGGGGAGGCTGCTGGTGAATATTAACCAAGGTCAACCCAGTTATCTGTGGAGCAAACAGGGGCTAAGTCCA |
| | | T |
| 591 | 4717_Human_quadMut_35T_46A_62C_72A_n1 | GGGGGAGGCTGCTGGTGAATATTAACCAAGGTCATCCCAGTTATCAGAGGAGCAAACAGGGCCTAAGTCCA |
| | | A |
| 592 | 4718_Human_quadMut_35T_48G_52C_62C_n1 | GGGGGAGGCTGCTGGTGAATATTAACCAAGGTCATCCCAGTTATCGGGGGACCAAACAGGGCCTAAGTCCA |
| | | C |
| 593 | 4720_Human_quadMut_35G_48G_62C_72T_n1 | GGGGGAGGCTGCTGGTGAATATTAACCAAGGTCAGCCCAGTTATCGGGGGAGCAAACAGGGCCTAAGTCCA |
| | | T |
| 594 | 4723_Human_quadMut_37T_45G_46A_52A_n1 | GGGGGAGGCTGCTGGTGAATATTAACCAAGGTCACCTCAGTTATGAGAGGAACAAACAGGGGCTAAGTCCA |
| | | C |
| 595 | 4728_Human_quadMut_37T_45G_48T_72G_n1 | GGGGGAGGCTGCTGGTGAATATTAACCAAGGTCACCTCAGTTATGGGTGGAGCAAACAGGGGCTAAGTCCA |
| | | G |
| 596 | 4730_Human_quadMut_37T_45T_52A_72T_n1 | GGGGGAGGCTGCTGGTGAATATTAACCAAGGTCACCTCAGTTATTGGAGGAACAAACAGGGGCTAAGTCCA |
| | | T |
| 597 | 4733_Human_quadMut_37T_46T_48T_62T_n1 | GGGGGAGGCTGCTGGTGAATATTAACCAAGGTCACCTCAGTTATCTGTGGAGCAAACAGGGTCTAAGTCCA |
| | | C |
| 598 | 4734_Human_quadMut_37A_46T_48G_72G_n1 | GGGGGAGGCTGCTGGTGAATATTAACCAAGGTCACCACAGTTATCTGGGGAGCAAACAGGGGCTAAGTCCA |
| | | G |
| 599 | 4735_Human_quadMut_37A_46A_52T_62A_n1 | GGGGGAGGCTGCTGGTGAATATTAACCAAGGTCACCACAGTTATCAGAGGATCAAACAGGGACTAAGTCCA |
| | | C |
| 600 | 4736_Human_quadMut_37T_46T_52A_72A_n1 | GGGGGAGGCTGCTGGTGAATATTAACCAAGGTCACCTCAGTTATCTGAGGAACAAACAGGGGCTAAGTCCA |
| | | A |
| 601 | 4738_Human_quadMut_37T_48G_52A_62A_n1 | GGGGGAGGCTGCTGGTGAATATTAACCAAGGTCACCTCAGTTATCGGGGGAACAAACAGGGACTAAGTCCA |
| | | C |
| 602 | 4739_Human_quadMut_37A_48G_52A_72A_n1 | GGGGGAGGCTGCTGGTGAATATTAACCAAGGTCACCACAGTTATCGGGGGAACAAACAGGGGCTAAGTCCA |
| | | A |
| 603 | 4740_Human_quadMut_37T_48G_62C_72A_n1 | GGGGGAGGCTGCTGGTGAATATTAACCAAGGTCACCTCAGTTATCGGGGGAGCAAACAGGGCCTAAGTCCA |
| | | A |
| 604 | 4742_Human_quadMut_45T_46T_48G_52C_n1 | GGGGGAGGCTGCTGGTGAATATTAACCAAGGTCACCCCAGTTATTTGGGGACCAAACAGGGGCTAAGTCCA |
| | | C |
| 605 | 4751_Human_quadMut_45T_52T_62T_72G_n1 | GGGGGAGGCTGCTGGTGAATATTAACCAAGGTCACCCCAGTTATTGGAGGATCAAACAGGGTCTAAGTCCA |
| | | G |
| 606 | 4755_Human_quadMut_46T_52T_62T_72G_n1 | GGGGGAGGCTGCTGGTGAATATTAACCAAGGTCACCCCAGTTATCTGAGGATCAAACAGGGTCTAAGTCCA |
| | | G |
| 607 | 4761_Human_quadMut_1T_3T_8T_46A_n1 | TGTGGAGTCTGCTGGTGAATATTAACCAAGGTCACCCCAGTTATCAGAGGAGCAAACAGGGGCTAAGTCCA |
| | | C |
| 608 | 4763_Human_quadMut_1A_3T_8T_52T_n1 | AGTGGAGTCTGCTGGTGAATATTAACCAAGGTCACCCCAGTTATCGGAGGATCAAACAGGGGCTAAGTCCA |
| | | C |
| 609 | 4766_Human_quadMut_1A_3A_14A_35G_n1 | AGAGGAGGCTGCTAGTGAATATTAACCAAGGTCAGCCCAGTTATCGGAGGAGCAAACAGGGGCTAAGTCCA |
| | | C |
| 610 | 4770_Human_quadMut_1A_3A_14A_48T_n1 | AGAGGAGGCTGCTAGTGAATATTAACCAAGGTCACCCCAGTTATCGGTGGAGCAAACAGGGGCTAAGTCCA |
| | | C |
| 611 | 4771_Human_quadMut_1A_3T_14A_52T_n1 | AGTGGAGGCTGCTAGTGAATATTAACCAAGGTCACCCCAGTTATCGGAGGATCAAACAGGGGCTAAGTCCA |
| | | C |
| 612 | 4772_Human_quadMut_1T_3T_14A_62T_n1 | TGTGGAGGCTGCTAGTGAATATTAACCAAGGTCACCCCAGTTATCGGAGGAGCAAACAGGGTCTAAGTCCA |
| | | C |
| 613 | 4776_Human_quadMut_1A_3A_35A_48G_n1 | AGAGGAGGCTGCTGGTGAATATTAACCAAGGTCAACCCAGTTATCGGGGGAGCAAACAGGGGCTAAGTCCA |
| | | C |
| 614 | 4777_Human_quadMut_1A_3A_35T_52C_n1 | AGAGGAGGCTGCTGGTGAATATTAACCAAGGTCATCCCAGTTATCGGAGGACCAAACAGGGGCTAAGTCCA |
| | | C |
| 615 | 4778_Human_quadMut_1A_3T_35A_62T_n1 | AGTGGAGGCTGCTGGTGAATATTAACCAAGGTCAACCCAGTTATCGGAGGAGCAAACAGGGTCTAAGTCCA |
| | | C |
| 616 | 4779_Human_quadMut_1A_3A_35G_72A_n1 | AGAGGAGGCTGCTGGTGAATATTAACCAAGGTCAGCCCAGTTATCGGAGGAGCAAACAGGGGCTAAGTCCA |
| | | A |
| 617 | 4780_Human_quadMut_1T_3A_37T_45T_n1 | TGAGGAGGCTGCTGGTGAATATTAACCAAGGTCACCTCAGTTATTGGAGGAGCAAACAGGGGCTAAGTCCA |
| | | C |
| 618 | 4783_Human_quadMut_1T_3A_37T_52A_n1 | TGAGGAGGCTGCTGGTGAATATTAACCAAGGTCACCTCAGTTATCGGAGGAACAAACAGGGGCTAAGTCCA |
| | | C |
| 619 | 4784_Human_quadMut_1T_3A_37A_62T_n1 | TGAGGAGGCTGCTGGTGAATATTAACCAAGGTCACCACAGTTATCGGAGGAGCAAACAGGGTCTAAGTCCA |
| | | C |
| 620 | 4788_Human_quadMut_1T_3A_45A_52C_n1 | TGAGGAGGCTGCTGGTGAATATTAACCAAGGTCACCCCAGTTATAGGAGGACCAAACAGGGGCTAAGTCCA |
| | | C |
| 621 | 4790_Human_quadMut_1A_3T_45G_72A_n1 | AGTGGAGGCTGCTGGTGAATATTAACCAAGGTCACCCCAGTTATGGGAGGAGCAAACAGGGGCTAAGTCCA |
| | | A |
| 622 | 4791_Human_quadMut_1T_3T_46A_48T_n1 | TGTGGAGGCTGCTGGTGAATATTAACCAAGGTCACCCCAGTTATCAGTGGAGCAAACAGGGGCTAAGTCCA |
| | | C |
| 623 | 4792_Human_quadMut_1A_3A_46T_52A_n1 | AGAGGAGGCTGCTGGTGAATATTAACCAAGGTCACCCCAGTTATCTGAGGAACAAACAGGGGCTAAGTCCA |
| | | C |
| 624 | 4796_Human_quadMut_1T_3A_48T_62T_n1 | TGAGGAGGCTGCTGGTGAATATTAACCAAGGTCACCCCAGTTATCGGTGGAGCAAACAGGGTCTAAGTCCA |
| | | C |
| 625 | 4798_Human_quadMut_1T_3A_52A_62C_n1 | TGAGGAGGCTGCTGGTGAATATTAACCAAGGTCACCCCAGTTATCGGAGGAACAAACAGGGCCTAAGTCCA |
| | | C |
| 626 | 4805_Human_quadMut_1T_8A_14T_48T_n1 | TGGGGAGACTGCTTGTGAATATTAACCAAGGTCACCCCAGTTATCGGTGGAGCAAACAGGGGCTAAGTCCA |
| | | C |
| 627 | 4806_Human_quadMut_1A_8A_14A_52T_n1 | AGGGGAGACTGCTAGTGAATATTAACCAAGGTCACCCCAGTTATCGGAGGATCAAACAGGGGCTAAGTCCA |
| | | C |
| 728 | 4809_Human_quadMut_1A_8C_35A_37A_n1 | AGGGGAGCCTGCTGGTGAATATTAACCAAGGTCAACACAGTTATCGGAGGAGCAAACAGGGGCTAAGTCCA |
| | | C |
| 629 | 4810_Human_quadMut_1A_8C_35A_45A_n1 | AGGGGAGCCTGCTGGTGAATATTAACCAAGGTCAACCCAGTTATAGGAGGAGCAAACAGGGGCTAAGTCCA |
| | | C |
| 630 | 4811_Human_quadMut_1A_8T_35G_46A_n1 | AGGGGAGTCTGCTGGTGAATATTAACCAAGGTCAGCCCAGTTATCAGAGGAGCAAACAGGGGCTAAGTCCA |
| | | C |
| 631 | 4812_Human_quadMut_1T_8A_35T_48T_n1 | TGGGGAGACTGCTGGTGAATATTAACCAAGGTCATCCCAGTTATCGGTGGAGCAAACAGGGGCTAAGTCCA |
| | | C |
| 632 | 4819_Human_quadMut_1A_8T_37T_52T_n1 | AGGGGAGTCTGCTGGTGAATATTAACCAAGGTCACCTCAGTTATCGGAGGATCAAACAGGGGCTAAGTCCA |
| | | C |
| 633 | 4820_Human_quadMut_1A_8A_37T_72G_n1 | AGGGGAGACTGCTGGTGAATATTAACCAAGGTCACCTCAGTTATCGGAGGAGCAAACAGGGGCTAAGTCCA |
| | | G |
| 634 | 4822_Human_quadMut_1T_8A_45A_48G_n1 | TGGGGAGACTGCTGGTGAATATTAACCAAGGTCACCCCAGTTATAGGGGGAGCAAACAGGGGCTAAGTCCA |
| | | C |
| 635 | 4826_Human_quadMut_1T_8T_46T_48T_n1 | TGGGGAGTCTGCTGGTGAATATTAACCAAGGTCACCCCAGTTATCTGTGGAGCAAACAGGGGCTAAGTCCA |
| | | C |
| 636 | 4833_Human_quadMut_1T_8C_52T_72G_n1 | TGGGGAGCCTGCTGGTGAATATTAACCAAGGTCACCCCAGTTATCGGAGGATCAAACAGGGGCTAAGTCCA |
| | | G |
| 637 | 4839_Human_quadMut_1A_14T_35T_52T_n1 | AGGGGAGGCTGCTTGTGAATATTAACCAAGGTCATCCCAGTTATCGGAGGATCAAACAGGGGCTAAGTCCA |
| | | C |
| 638 | 4853_Human_quadMut_1A_14A_46A_48G_n1 | AGGGGAGGCTGCTAGTGAATATTAACCAAGGTCACCCCAGTTATCAGGGGAGCAAACAGGGGCTAAGTCCA |
| | | C |
| 639 | 4864_Human_quadMut_1A_35A_37A_46T_n1 | AGGGGAGGCTGCTGGTGAATATTAACCAAGGTCAACACAGTTATCTGAGGAGCAAACAGGGGCTAAGTCCA |
| | | C |
| 640 | 4867_Human_quadMut_1A_35A_37T_62C_n1 | AGGGGAGGCTGCTGGTGAATATTAACCAAGGTCAACTCAGTTATCGGAGGAGCAAACAGGGCCTAAGTCCA |
| | | C |
| 641 | 4872_Human_quadMut_1T_35A_45T_62T_n1 | TGGGGAGGCTGCTGGTGAATATTAACCAAGGTCAACCCAGTTATTGGAGGAGCAAACAGGGTCTAAGTCCA |
| | | C |
| 642 | 4876_Human_quadMut_1A_35A_46A_62C_n1 | AGGGGAGGCTGCTGGTGAATATTAACCAAGGTCAACCCAGTTATCAGAGGAGCAAACAGGGCCTAAGTCCA |
| | | C |
| 643 | 4879_Human_quadMut_1A_35A_48T_62T_n1 | AGGGGAGGCTGCTGGTGAATATTAACCAAGGTCAACCCAGTTATCGGTGGAGCAAACAGGGTCTAAGTCCA |
| | | C |
| 644 | 4880_Human_quadMut_1A_35G_48G_72T_n1 | AGGGGAGGCTGCTGGTGAATATTAACCAAGGTCAGCCCAGTTATCGGGGGAGCAAACAGGGGCTAAGTCCA |
| | | T |
| 645 | 4884_Human_quadMut_1A_37T_45T_46T_n1 | AGGGGAGGCTGCTGGTGAATATTAACCAAGGTCACCTCAGTTATTTGAGGAGCAAACAGGGGCTAAGTCCA |
| | | C |
| 646 | 4887_Human_quadMut_1A_37A_45T_62C_n1 | AGGGGAGGCTGCTGGTGAATATTAACCAAGGTCACCACAGTTATTGGAGGAGCAAACAGGGCCTAAGTCCA |
| | | C |
| 647 | 4890_Human_quadMut_1T_37A_46T_52T_n1 | TGGGGAGGCTGCTGGTGAATATTAACCAAGGTCACCACAGTTATCTGAGGATCAAACAGGGGCTAAGTCCA |
| | | C |
| 648 | 4891_Human_quadMut_1A_37A_46T_62A_n1 | AGGGGAGGCTGCTGGTGAATATTAACCAAGGTCACCACAGTTATCTGAGGAGCAAACAGGGACTAAGTCCA |
| | | C |
| 649 | 4892_Human_quadMut_1T_37T_46A_72A_n1 | TGGGGAGGCTGCTGGTGAATATTAACCAAGGTCACCTCAGTTATCAGAGGAGCAAACAGGGGCTAAGTCCA |
| | | A |
| 650 | 4894_Human_quadMut_1A_37A_48G_62A_n1 | AGGGGAGGCTGCTGGTGAATATTAACCAAGGTCACCACAGTTATCGGGGGAGCAAACAGGGACTAAGTCCA |
| | | C |
| 651 | 4896_Human_quadMut_1T_37A_52T_62A_n1 | TGGGGAGGCTGCTGGTGAATATTAACCAAGGTCACCACAGTTATCGGAGGATCAAACAGGGACTAAGTCCA |
| | | C |
| 652 | 4898_Human_quadMut_1A_37T_62T_72T_n1 | AGGGGAGGCTGCTGGTGAATATTAACCAAGGTCACCTCAGTTATCGGAGGAGCAAACAGGGTCTAAGTCCA |
| | | T |
| 653 | 4907_Human_quadMut_1A_45G_52A_72A_n1 | AGGGGAGGCTGCTGGTGAATATTAACCAAGGTCACCCCAGTTATGGGAGGAACAAACAGGGGCTAAGTCCA |
| | | A |
| 654 | 4911_Human_quadMut_1A_46A_52A_62T_n1 | AGGGGAGGCTGCTGGTGAATATTAACCAAGGTCACCCCAGTTATCAGAGGAACAAACAGGGTCTAAGTCCA |
| | | C |
| 655 | 4914_Human_quadMut_1A_48T_52T_62C_n1 | AGGGGAGGCTGCTGGTGAATATTAACCAAGGTCACCCCAGTTATCGGTGGATCAAACAGGGCCTAAGTCCA |
| | | C |
| 656 | 4923_Human_quadMut_3A_8A_14A_52A_n1 | GGAGGAGACTGCTAGTGAATATTAACCAAGGTCACCCCAGTTATCGGAGGAACAAACAGGGGCTAAGTCCA |
| | | C |
| 657 | 4926_Human_quadMut_3A_8C_35A_37A_n1 | GGAGGAGCCTGCTGGTGAATATTAACCAAGGTCAACACAGTTATCGGAGGAGCAAACAGGGGCTAAGTCCA |
| | | C |
| 658 | 4932_Human_quadMut_3A_8C_35A_72A_n1 | GGAGGAGCCTGCTGGTGAATATTAACCAAGGTCAACCCAGTTATCGGAGGAGCAAACAGGGGCTAAGTCCA |
| | | A |
| 659 | 4934_Human_quadMut_3A_8C_37T_46T_n1 | GGAGGAGCCTGCTGGTGAATATTAACCAAGGTCACCTCAGTTATCTGAGGAGCAAACAGGGGCTAAGTCCA |
| | | C |
| 660 | 4935_Human_quadMut_3T_8C_37A_48T_n1 | GGTGGAGCCTGCTGGTGAATATTAACCAAGGTCACCACAGTTATCGGTGGAGCAAACAGGGGCTAAGTCCA |
| | | C |
| 661 | 4943_Human_quadMut_3A_8A_46T_48T_n1 | GGAGGAGACTGCTGGTGAATATTAACCAAGGTCACCCCAGTTATCTGTGGAGCAAACAGGGGCTAAGTCCA |
| | | C |
| 662 | 4944_Human_quadMut_3A_8A_46A_52T_n1 | GGAGGAGACTGCTGGTGAATATTAACCAAGGTCACCCCAGTTATCAGAGGATCAAACAGGGGCTAAGTCCA |
| | | C |
| 663 | 4947_Human_quadMut_3T_8T_48T_52T_n1 | GGTGGAGTCTGCTGGTGAATATTAACCAAGGTCACCCCAGTTATCGGTGGATCAAACAGGGGCTAAGTCCA |
| | | C |
| 664 | 4951_Human_quadMut_3T_8A_52A_72G_n1 | GGTGGAGACTGCTGGTGAATATTAACCAAGGTCACCCCAGTTATCGGAGGAACAAACAGGGGCTAAGTCCA |
| | | G |
| 665 | 4952_Human_quadMut_3T_8C_62T_72A_n1 | GGTGGAGCCTGCTGGTGAATATTAACCAAGGTCACCCCAGTTATCGGAGGAGCAAACAGGGTCTAAGTCCA |
| | | A |
| 666 | 4955_Human_quadMut_3T_14T_35T_46A_n1 | GGTGGAGGCTGCTTGTGAATATTAACCAAGGTCATCCCAGTTATCAGAGGAGCAAACAGGGGCTAAGTCCA |
| | | C |
| 667 | 4956_Human_quadMut_3A_14A_35G_48G_n1 | GGAGGAGGCTGCTAGTGAATATTAACCAAGGTCAGCCCAGTTATCGGGGGAGCAAACAGGGGCTAAGTCCA |
| | | C |
| 668 | 4957_Human_quadMut_3T_14T_35T_52T_n1 | GGTGGAGGCTGCTTGTGAATATTAACCAAGGTCATCCCAGTTATCGGAGGATCAAACAGGGGCTAAGTCCA |
| | | C |
| 669 | 4975_Human_quadMut_3A_14A_48G_62T_n1 | GGAGGAGGCTGCTAGTGAATATTAACCAAGGTCACCCCAGTTATCGGGGGAGCAAACAGGGTCTAAGTCCA |
| | | C |
| 670 | 4976_Human_quadMut_3A_14A_48T_72A_n1 | GGAGGAGGCTGCTAGTGAATATTAACCAAGGTCACCCCAGTTATCGGTGGAGCAAACAGGGGCTAAGTCCA |
| | | A |
| 671 | 4977_Human_quadMut_3T_14A_52A_62T_n1 | GGTGGAGGCTGCTAGTGAATATTAACCAAGGTCACCCCAGTTATCGGAGGAACAAACAGGGTCTAAGTCCA |
| | | C |
| 672 | 4980_Human_quadMut_3T_35A_37T_46T_n1 | GGTGGAGGCTGCTGGTGAATATTAACCAAGGTCAACTCAGTTATCTGAGGAGCAAACAGGGGCTAAGTCCA |
| | | C |
| 673 | 4986_Human_quadMut_3T_35A_45A_48T_n1 | GGTGGAGGCTGCTGGTGAATATTAACCAAGGTCAACCCAGTTATAGGTGGAGCAAACAGGGGCTAAGTCCA |
| | | C |
| 674 | 4988_Human_quadMut_3T_35G_45T_62T_n1 | GGTGGAGGCTGCTGGTGAATATTAACCAAGGTCAGCCCAGTTATTGGAGGAGCAAACAGGGTCTAAGTCCA |
| | | C |
| 675 | 4991_Human_quadMut_3A_35A_46A_52C_n1 | GGAGGAGGCTGCTGGTGAATATTAACCAAGGTCAACCCAGTTATCAGAGGACCAAACAGGGGCTAAGTCCA |
| | | C |
| 676 | 4992_Human_quadMut_3A_35T_46A_62A_n1 | GGAGGAGGCTGCTGGTGAATATTAACCAAGGTCATCCCAGTTATCAGAGGAGCAAACAGGGACTAAGTCCA |
| | | C |
| 677 | 4993_Human_quadMut_3T_35T_46T_72T_n1 | GGTGGAGGCTGCTGGTGAATATTAACCAAGGTCATCCCAGTTATCTGAGGAGCAAACAGGGGCTAAGTCCA |
| | | T |
| 678 | 4995_Human_quadMut_3T_35A_48T_62A_n1 | GGTGGAGGCTGCTGGTGAATATTAACCAAGGTCAACCCAGTTATCGGTGGAGCAAACAGGGACTAAGTCCA |
| | | C |
| 679 | 4997_Human_quadMut_3A_35A_52T_62T_n1 | GGAGGAGGCTGCTGGTGAATATTAACCAAGGTCAACCCAGTTATCGGAGGATCAAACAGGGTCTAAGTCCA |
| | | C |
| 680 | 5000_Human_quadMut_3T_37T_45A_46A_n1 | GGTGGAGGCTGCTGGTGAATATTAACCAAGGTCACCTCAGTTATAAGAGGAGCAAACAGGGGCTAAGTCCA |
| | | C |
| 681 | 5003_Human_quadMut_3T_37A_45T_62T_n1 | GGTGGAGGCTGCTGGTGAATATTAACCAAGGTCACCACAGTTATTGGAGGAGCAAACAGGGTCTAAGTCCA |
| | | C |
| 682 | 5004_Human_quadMut_3A_37T_46A_48G_n1 | GGAGGAGGCTGCTGGTGAATATTAACCAAGGTCACCTCAGTTATCAGGGGAGCAAACAGGGGCTAAGTCCA |
| | | C |
| 683 | 5005_Human_quadMut_3A_37A_46T_52T_n1 | GGAGGAGGCTGCTGGTGAATATTAACCAAGGTCACCACAGTTATCTGAGGATCAAACAGGGGCTAAGTCCA |
| | | C |
| 684 | 5006_Human_quadMut_3A_37A_46A_62T_n1 | GGAGGAGGCTGCTGGTGAATATTAACCAAGGTCACCACAGTTATCAGAGGAGCAAACAGGGTCTAAGTCCA |
| | | C |
| 685 | 5008_Human_quadMut_3A_37A_48G_52T_n1 | GGAGGAGGCTGCTGGTGAATATTAACCAAGGTCACCACAGTTATCGGGGGATCAAACAGGGGCTAAGTCCA |
| | | C |
| 686 | 5010_Human_quadMut_3T_37A_48G_72A_n1 | GGTGGAGGCTGCTGGTGAATATTAACCAAGGTCACCACAGTTATCGGGGGAGCAAACAGGGGCTAAGTCCA |
| | | A |
| 687 | 5019_Human_quadMut_3T_45G_48G_62T_n1 | GGTGGAGGCTGCTGGTGAATATTAACCAAGGTCACCCCAGTTATGGGGGGAGCAAACAGGGTCTAAGTCCA |
| | | C |
| 688 | 5025_Human_quadMut_3A_46A_48T_62C_n1 | GGAGGAGGCTGCTGGTGAATATTAACCAAGGTCACCCCAGTTATCAGTGGAGCAAACAGGGCCTAAGTCCA |
| | | C |
| 689 | 5027_Human_quadMut_3T_46A_52A_62T_n1 | GGTGGAGGCTGCTGGTGAATATTAACCAAGGTCACCCCAGTTATCAGAGGAACAAACAGGGTCTAAGTCCA |
| | | C |
| 690 | 5030_Human_quadMut_3T_48G_52T_62T_n1 | GGTGGAGGCTGCTGGTGAATATTAACCAAGGTCACCCCAGTTATCGGGGGATCAAACAGGGTCTAAGTCCA |
| | | C |
| 691 | 5032_Human_quadMut_3A_48T_62C_72A_n1 | GGAGGAGGCTGCTGGTGAATATTAACCAAGGTCACCCCAGTTATCGGTGGAGCAAACAGGGCCTAAGTCCA |
| | | A |
| 692 | 5033_Human_quadMut_3T_52T_62C_72G_n1 | GGTGGAGGCTGCTGGTGAATATTAACCAAGGTCACCCCAGTTATCGGAGGATCAAACAGGGCCTAAGTCCA |
| | | G |
| 693 | 5036_Human_quadMut_8T_14A_35T_46T_n1 | GGGGGAGTCTGCTAGTGAATATTAACCAAGGTCATCCCAGTTATCTGAGGAGCAAACAGGGGCTAAGTCCA |
| | | C |
| 694 | 5037_Human_quadMut_8C_14T_35T_48G_n1 | GGGGGAGCCTGCTTGTGAATATTAACCAAGGTCATCCCAGTTATCGGGGGAGCAAACAGGGGCTAAGTCCA |
| | | C |
| 695 | 5040_Human_quadMut_8T_14A_35G_72G_n1 | GGGGGAGTCTGCTAGTGAATATTAACCAAGGTCAGCCCAGTTATCGGAGGAGCAAACAGGGGCTAAGTCCA |
| | | G |
| 696 | 5041_Human_quadMut_8T_14A_37T_45T_n1 | GGGGGAGTCTGCTAGTGAATATTAACCAAGGTCACCTCAGTTATTGGAGGAGCAAACAGGGGCTAAGTCCA |
| | | C |
| 697 | 5042_Human_quadMut_8C_14A_37T_46A_n1 | GGGGGAGCCTGCTAGTGAATATTAACCAAGGTCACCTCAGTTATCAGAGGAGCAAACAGGGGCTAAGTCCA |
| | | C |
| 698 | 5043_Human_quadMut_8A_14A_37A_48G_n1 | GGGGGAGACTGCTAGTGAATATTAACCAAGGTCACCACAGTTATCGGGGGAGCAAACAGGGGCTAAGTCCA |
| | | C |
| 699 | 5051_Human_quadMut_8C_14T_46A_52T_n1 | GGGGGAGCCTGCTTGTGAATATTAACCAAGGTCACCCCAGTTATCAGAGGATCAAACAGGGGCTAAGTCCA |
| | | C |
| 700 | 5052_Human_quadMut_8A_14T_46A_62C_n1 | GGGGGAGACTGCTTGTGAATATTAACCAAGGTCACCCCAGTTATCAGAGGAGCAAACAGGGCCTAAGTCCA |
| | | C |
| 701 | 5056_Human_quadMut_8C_14A_48G_72A_n1 | GGGGGAGCCTGCTAGTGAATATTAACCAAGGTCACCCCAGTTATCGGGGGAGCAAACAGGGGCTAAGTCCA |
| | | A |
| 702 | 5057_Human_quadMut_8T_14A_52A_62C_n1 | GGGGGAGTCTGCTAGTGAATATTAACCAAGGTCACCCCAGTTATCGGAGGAACAAACAGGGCCTAAGTCCA |
| | | C |
| 703 | 5063_Human_quadMut_8A_35A_37A_52T_n1 | GGGGGAGACTGCTGGTGAATATTAACCAAGGTCAACACAGTTATCGGAGGATCAAACAGGGGCTAAGTCCA |
| | | C |
| 704 | 5071_Human_quadMut_8T_35A_46T_48T_n1 | GGGGGAGTCTGCTGGTGAATATTAACCAAGGTCAACCCAGTTATCTGTGGAGCAAACAGGGGCTAAGTCCA |
| | | C |
| 705 | 5072_Human_quadMut_8A_35G_46T_52T_n1 | GGGGGAGACTGCTGGTGAATATTAACCAAGGTCAGCCCAGTTATCTGAGGATCAAACAGGGGCTAAGTCCA |
| | | C |
| 706 | 5073_Human_quadMut_8T_35G_46T_62T_n1 | GGGGGAGTCTGCTGGTGAATATTAACCAAGGTCAGCCCAGTTATCTGAGGAGCAAACAGGGTCTAAGTCCA |
| | | C |
| 707 | 5074_Human_quadMut_8T_35G_46T_72A_n1 | GGGGGAGTCTGCTGGTGAATATTAACCAAGGTCAGCCCAGTTATCTGAGGAGCAAACAGGGGCTAAGTCCA |
| | | A |
| 708 | 5075_Human_quadMut_8T_35T_48G_52T_n1 | GGGGGAGTCTGCTGGTGAATATTAACCAAGGTCATCCCAGTTATCGGGGGATCAAACAGGGGCTAAGTCCA |
| | | C |
| 709 | 5080_Human_quadMut_8A_35T_62T_72G_n1 | GGGGGAGACTGCTGGTGAATATTAACCAAGGTCATCCCAGTTATCGGAGGAGCAAACAGGGTCTAAGTCCA |
| | | G |
| 710 | 5081_Human_quadMut_8A_37A_45A_46T_n1 | GGGGGAGACTGCTGGTGAATATTAACCAAGGTCACCACAGTTATATGAGGAGCAAACAGGGGCTAAGTCCA |
| | | C |
| 711 | 5083_Human_quadMut_8T_37T_45T_52T_n1 | GGGGGAGTCTGCTGGTGAATATTAACCAAGGTCACCTCAGTTATTGGAGGATCAAACAGGGGCTAAGTCCA |
| | | C |
| 712 | 5085_Human_quadMut_8T_37T_45T_72T_n1 | GGGGGAGTCTGCTGGTGAATATTAACCAAGGTCACCTCAGTTATTGGAGGAGCAAACAGGGGCTAAGTCCA |
| | | T |
| 713 | 5086_Human_quadMut_8A_37T_46T_48G_n1 | GGGGGAGACTGCTGGTGAATATTAACCAAGGTCACCTCAGTTATCTGGGGAGCAAACAGGGGCTAAGTCCA |
| | | C |
| 714 | 5087_Human_quadMut_8A_37A_46A_52A_n1 | GGGGGAGACTGCTGGTGAATATTAACCAAGGTCACCACAGTTATCAGAGGAACAAACAGGGGCTAAGTCCA |
| | | C |
| 715 | 5088_Human_quadMut_8A_37A_46A_62C_n1 | GGGGGAGACTGCTGGTGAATATTAACCAAGGTCACCACAGTTATCAGAGGAGCAAACAGGGCCTAAGTCCA |
| | | C |
| 716 | 5089_Human_quadMut_8T_37A_46T_72A_n1 | GGGGGAGTCTGCTGGTGAATATTAACCAAGGTCACCACAGTTATCTGAGGAGCAAACAGGGGCTAAGTCCA |
| | | A |
| 717 | 5090_Human_quadMut_8A_37A_48G_52T_n1 | GGGGGAGACTGCTGGTGAATATTAACCAAGGTCACCACAGTTATCGGGGGATCAAACAGGGGCTAAGTCCA |
| | | C |
| 718 | 5092_Human_quadMut_8T_37T_48T_72G_n1 | GGGGGAGTCTGCTGGTGAATATTAACCAAGGTCACCTCAGTTATCGGTGGAGCAAACAGGGGCTAAGTCCA |
| | | G |
| 719 | 5093_Human_quadMut_8C_37A_52T_62T_n1 | GGGGGAGCCTGCTGGTGAATATTAACCAAGGTCACCACAGTTATCGGAGGATCAAACAGGGTCTAAGTCCA |
| | | C |
| 720 | 5100_Human_quadMut_8T_45G_48G_52A_n1 | GGGGGAGTCTGCTGGTGAATATTAACCAAGGTCACCCCAGTTATGGGGGGAACAAACAGGGGCTAAGTCCA |
| | | C |
| 721 | 5104_Human_quadMut_8T_45G_52T_72G_n1 | GGGGGAGTCTGCTGGTGAATATTAACCAAGGICACCCCAGTTATGGGAGGATCAAACAGGGGCTAAGTCCA |
| | | G |
| 722 | 5107_Human_quadMut_8A_46A_48T_62T_n1 | GGGGGAGACTGCTGGTGAATATTAACCAAGGTCACCCCAGTTATCAGTGGAGCAAACAGGGTCTAAGTCCA |
| | | C |
| 723 | 5109_Human_quadMut_8A_46T_52T_62T_n1 | GGGGGAGACTGCTGGTGAATATTAACCAAGGTCACCCCAGTTATCTGAGGATCAAACAGGGTCTAAGTCCA |
| | | C |
| 724 | 5110_Human_quadMut_8C_46T_52C_72A_n1 | GGGGGAGCCTGCTGGTGAATATTAACCAAGGTCACCCCAGTTATCTGAGGACCAAACAGGGGCTAAGTCCA |
| | | A |
| 725 | 5115_Human_quadMut_8T_52A_62A_72T_n1 | GGGGGAGTCTGCTGGTGAATATTAACCAAGGTCACCCCAGTTATCGGAGGAACAAACAGGGACTAAGTCCA |
| | | T |
| 726 | 5119_Human_quadMut_14A_35G_37A_52A_n1 | GGGGGAGGCTGCTAGTGAATATTAACCAAGGTCAGCACAGTTATCGGAGGAACAAACAGGGGCTAAGTCCA |
| | | C |
| 727 | 5128_Human_quadMut_14T_35T_46A_52A_n1 | GGGGGAGGCTGCTTGTGAATATTAACCAAGGTCATCCCAGTTATCAGAGGAACAAACAGGGGCTAAGTCCA |
| | | C |
| 728 | 5132_Human_quadMut_14A_35G_48T_62T_n1 | GGGGGAGGCTGCTAGTGAATATTAACCAAGGTCAGCCCAGTTATCGGTGGAGCAAACAGGGTCTAAGTCCA |
| | | C |
| 729 | 5133_Human_quadMut_14A_35T_48T_72G_n1 | GGGGGAGGCTGCTAGTGAATATTAACCAAGGTCATCCCAGTTATCGGTGGAGCAAACAGGGGCTAAGTCCA |
| | | G |
| 730 | 5134_Human_quadMut_14T_35G_52T_62C_n1 | GGGGGAGGCTGCTTGTGAATATTAACCAAGGTCAGCCCAGTTATCGGAGGATCAAACAGGGCCTAAGTCCA |
| | | C |
| 731 | 5135_Human_quadMut_14T_35A_52T_72G_n1 | GGGGGAGGCTGCTTGTGAATATTAACCAAGGTCAACCCAGTTATCGGAGGATCAAACAGGGGCTAAGTCCA |
| | | G |
| 732 | 5140_Human_quadMut_14A_37T_45G_62T_n1 | GGGGGAGGCTGCTAGTGAATATTAACCAAGGTCACCTCAGTTATGGGAGGAGCAAACAGGGTCTAAGTCCA |
| | | C |
| 733 | 5142_Human_quadMut_14A_37A_46A_48T_n1 | GGGGGAGGCTGCTAGTGAATATTAACCAAGGTCACCACAGTTATCAGTGGAGCAAACAGGGGCTAAGTCCA |
| | | C |
| 734 | 5145_Human_quadMut_14A_37T_46T_72A_n1 | GGGGGAGGCTGCTAGTGAATATTAACCAAGGTCACCTCAGTTATCTGAGGAGCAAACAGGGGCTAAGTCCA |
| | | A |
| 735 | 5146_Human_quadMut_14A_37T_48G_52A_n | GGGGGAGGCTGCTAGTGAATATTAACCAAGGTCACCTCAGTTATCGGGGGAACAAACAGGGGCTAAGTCCA |
| | | C |
| 736 | 5147_Human_quadMut_14A_37T_48T_62C_n1 | GGGGGAGGCTGCTAGTGAATATTAACCAAGGTCACCTCAGTTATCGGTGGAGCAAACAGGGCCTAAGTCCA |
| | | C |
| 737 | 5148_Human_quadMut_14A_37T_48G_72A_n1 | GGGGGAGGCTGCTAGTGAATATTAACCAAGGTCACCTCAGTTATCGGGGGAGCAAACAGGGGCTAAGTCCA |
| | | A |
| 738 | 5155_Human_quadMut_14T_45T_46T_72G_n1 | GGGGGAGGCTGCTTGTGAATATTAACCAAGGTCACCCCAGTTATTTGAGGAGCAAACAGGGGCTAAGTCCA |
| | | G |
| 739 | 5157_Human_quadMut_14T_45G_48G_62T_n1 | GGGGGAGGCTGCTTGTGAATATTAACCAAGGTCACCCCAGTTATGGGGGGAGCAAACAGGGTCTAAGTCCA |
| | | C |
| 740 | 5164_Human_quadMut_14T_46A_52T_62T_n1 | GGGGGAGGCTGCTTGTGAATATTAACCAAGGTCACCCCAGTTATCAGAGGATCAAACAGGGTCTAAGTCCA |
| | | C |
| 741 | 5165_Human_quadMut_14T_46A_52T_72G_n1 | GGGGGAGGCTGCTTGTGAATATTAACCAAGGTCACCCCAGTTATCAGAGGATCAAACAGGGGCTAAGTCCA |
| | | G |
| 742 | 5167_Human_quadMut_14A_48G_52A_62C_n1 | GGGGGAGGCTGCTAGTGAATATTAACCAAGGTCACCCCAGTTATCGGGGGAACAAACAGGGCCTAAGTCCA |
| | | C |
| 743 | 5171_Human_quadMut_35G_37A_45T_46T_n1 | GGGGGAGGCTGCTGGTGAATATTAACCAAGGTCAGCACAGTTATTTGAGGAGCAAACAGGGGCTAAGTCCA |
| | | C |
| 744 | 5175_Human_quadMut_35T_37A_46A_48G_n1 | GGGGGAGGCTGCTGGTGAATATTAACCAAGGTCATCACAGTTATCAGGGGAGCAAACAGGGGCTAAGTCCA |
| | | C |
| 745 | 5177_Human_quadMut_35G_37A_46A_72A_n1 | GGGGGAGGCTGCTGGTGAATATTAACCAAGGTCAGCACAGTTATCAGAGGAGCAAACAGGGGCTAAGTCCA |
| | | A |
| 746 | 5178_Human_quadMut_35G_37A_48G_52A_n1 | GGGGGAGGCTGCTGGTGAATATTAACCAAGGTCAGCACAGTTATCGGGGGAACAAACAGGGGCTAAGTCCA |
| | | C |
| 747 | 5179_Human_quadMut_35T_37T_48T_62A_n1 | GGGGGAGGCTGCTGGTGAATATTAACCAAGGTCATCTCAGTTATCGGTGGAGCAAACAGGGACTAAGTCCA |
| | | C |
| 748 | 5181_Human_quadMut_35T_37A_52A_62A_n1 | GGGGGAGGCTGCTGGTGAATATTAACCAAGGTCATCACAGTTATCGGAGGAACAAACAGGGACTAAGTCCA |
| | | C |
| 749 | 5185_Human_quadMut_35T_45A_46T_52A_n1 | GGGGGAGGCTGCTGGTGAATATTAACCAAGGTCATCCCAGTTATATGAGGAACAAACAGGGGCTAAGTCCA |
| | | C |
| 750 | 5186_Human_quadMut_35T_45T_46T_62T_n1 | GGGGGAGGCTGCTGGTGAATATTAACCAAGGTCATCCCAGTTATTTGAGGAGCAAACAGGGTCTAAGTCCA |
| | | C |
| 751 | 5188_Human_quadMut_35A_45A_48T_52A_n1 | GGGGGAGGCTGCTGGTGAATATTAACCAAGGTCAACCCAGTTATAGGTGGAACAAACAGGGGCTAAGTCCA |
| | | C |
| 752 | 5194_Human_quadMut_35G_46T_48G_52C_n1 | GGGGGAGGCTGCTGGTGAATATTAACCAAGGTCAGCCCAGTTATCTGGGGACCAAACAGGGGCTAAGTCCA |
| | | C |
| 753 | 5195_Human_quadMut_35T_46A_48G_62A_n1 | GGGGGAGGCTGCTGGTGAATATTAACCAAGGTCATCCCAGTTATCAGGGGAGCAAACAGGGACTAAGTCCA |
| | | C |
| 754 | 5196_Human_quadMut_35A_46T_48G_72A_n1 | GGGGGAGGCTGCTGGTGAATATTAACCAAGGTCAACCCAGTTATCTGGGGAGCAAACAGGGGCTAAGTCCA |
| | | A |
| 755 | 5197_Human_quadMut_35A_46T_52C_62T_n1 | GGGGGAGGCTGCTGGTGAATATTAACCAAGGTCAACCCAGTTATCTGAGGACCAAACAGGGTCTAAGTCCA |
| | | C |
| 756 | 5200_Human_quadMut_35A_48G_52A_62A_n1 | GGGGGAGGCTGCTGGTGAATATTAACCAAGGTCAACCCAGTTATCGGGGGAACAAACAGGGACTAAGTCCA |
| | | C |
| 757 | 5201_Human_quadMut_35A_48T_52T_72A_n1 | GGGGGAGGCTGCTGGTGAATATTAACCAAGGTCAACCCAGTTATCGGTGGATCAAACAGGGGCTAAGTCCA |
| | | A |
| 758 | 5202_Human_quadMut_35T_48G_62C_72T_n1 | GGGGGAGGCTGCTGGTGAATATTAACCAAGGTCATCCCAGTTATCGGGGGAGCAAACAGGGCCTAAGTCCA |
| | | T |
| 759 | 5203_Human_quadMut_35T_52T_62T_72T_n1 | GGGGGAGGCTGCTGGTGAATATTAACCAAGGTCATCCCAGTTATCGGAGGATCAAACAGGGTCTAAGTCCA |
| | | T |
| 760 | 5204_Human_quadMut_37A_45G_46A_48G_n1 | GGGGGAGGCTGCTGGTGAATATTAACCAAGGTCACCACAGTTATGAGGGGAGCAAACAGGGGCTAAGTCCA |
| | | C |
| 761 | 5205_Human_quadMut_37A_45A_46A_62T_n1 | GGGGGAGGCTGCTGGTGAATATTAACCAAGGTCACCACAGTTATAAGAGGAGCAAACAGGGTCTAAGTCCA |
| | | C |
| 762 | 5208_Human_quadMut_37T_45T_48G_62T_n1 | GGGGGAGGCTGCTGGTGAATATTAACCAAGGTCACCTCAGTTATTGGGGGAGCAAACAGGGTCTAAGTCCA |
| | | C |
| 763 | 5210_Human_quadMut_37A_45G_52A_62C_n1 | GGGGGAGGCTGCTGGTGAATATTAACCAAGGTCACCACAGTTATGGGAGGAACAAACAGGGCCTAAGTCCA |
| | | C |
| 764 | 5213_Human_quadMut_37A_46A_48G_52T_n1 | GGGGGAGGCTGCTGGTGAATATTAACCAAGGTCACCACAGTTATCAGGGGATCAAACAGGGGCTAAGTCCA |
| | | C |
| 765 | 5214_Human_quadMut_37A_46A_48G_62A_n1 | GGGGGAGGCTGCTGGTGAATATTAACCAAGGTCACCACAGTTATCAGGGGAGCAAACAGGGACTAAGTCCA |
| | | C |
| 766 | 5216_Human_quadMut_37T_46A_52A_62T_n1 | GGGGGAGGCTGCTGGTGAATATTAACCAAGGTCACCTCAGTTATCAGAGGAACAAACAGGGTCTAAGTCCA |
| | | C |
| 767 | 5217_Human_quadMut_37T_46A_52T_72A_n1 | GGGGGAGGCTGCTGGTGAATATTAACCAAGGTCACCTCAGTTATCAGAGGATCAAACAGGGGCTAAGTCCA |
| | | A |
| 768 | 5219_Human_quadMut_37A_48G_52T_62C_n1 | GGGGGAGGCTGCTGGTGAATATTAACCAAGGTCACCACAGTTATCGGGGGATCAAACAGGGCCTAAGTCCA |
| | | C |
| 769 | 5222_Human_quadMut_37T_52A_62T_72A_n1 | GGGGGAGGCTGCTGGTGAATATTAACCAAGGTCACCTCAGTTATCGGAGGAACAAACAGGGTCTAAGTCCA |
| | | A |
| 770 | 5223_Human_quadMut_45G_46A_48G_52A_n1 | GGGGGAGGCTGCTGGTGAATATTAACCAAGGTCACCCCAGTTATGAGGGGAACAAACAGGGGCTAAGTCCA |
| | | C |
| 771 | 5224_Human_quadMut_45T_46T_48T_62C_n1 | GGGGGAGGCTGCTGGTGAATATTAACCAAGGTCACCCCAGTTATTTGTGGAGCAAACAGGGCCTAAGTCCA |
| | | C |
| 772 | 5228_Human_quadMut_45G_46A_62T_72A_n1 | GGGGGAGGCTGCTGGTGAATATTAACCAAGGTCACCCCAGTTATGAGAGGAGCAAACAGGGTCTAAGTCCA |
| | | A |
| 773 | 5230_Human_quadMut_45A_48G_52T_72A_n1 | GGGGGAGGCTGCTGGTGAATATTAACCAAGGTCACCCCAGTTATAGGGGGATCAAACAGGGGCTAAGTCCA |
| | | A |
| 774 | 5232_Human_quadMut_45G_52T_62C_72T_n1 | GGGGGAGGCTGCTGGTGAATATTAACCAAGGTCACCCCAGTTATGGGAGGATCAAACAGGGCCTAAGTCCA |
| | | T |
| 775 | 5233_Human_quadMut_46A_48G_52C_62T_n1 | GGGGGAGGCTGCTGGTGAATATTAACCAAGGTCACCCCAGTTATCAGGGGACCAAACAGGGTCTAAGTCCA |
| | | C |
| 776 | 5235_Human_quadMut_46T_48G_62A_72T_n1 | GGGGGAGGCTGCTGGTGAATATTAACCAAGGTCACCCCAGTTATCTGGGGAGCAAACAGGGACTAAGTCCA |
| | | T |
| 777 | 5240_Human_quadMut_1T_3A_8A_46T_n1 | TGAGGAGACTGCTGGTGAATATTAACCAAGGTCACCCCAGTTATCTGAGGAGCAAACAGGGGCTAAGTCCA |
| | | C |
| 778 | 5241_Human_quadMut_1A_3A_8T_48T_n1 | AGAGGAGTCTGCTGGTGAATATTAACCAAGGTCACCCCAGTTATCGGTGGAGCAAACAGGGGCTAAGTCCA |
| | | C |
| 779 | 5242_Human_quadMut_1A_3A_8A_52T_n1 | AGAGGAGACTGCTGGTGAATATTAACCAAGGTCACCCCAGTTATCGGAGGATCAAACAGGGGCTAAGTCCA |
| | | C |
| 780 | 5243_Human_quadMut_1A_3A_8C_62C_n1 | AGAGGAGCCTGCTGGTGAATATTAACCAAGGTCACCCCAGTTATCGGAGGAGCAAACAGGGCCTAAGTCCA |
| | | C |
| 781 | 5245_Human_quadMut_1A_3T_14A_35G_n1 | AGTGGAGGCTGCTAGTGAATATTAACCAAGGTCAGCCCAGTTATCGGAGGAGCAAACAGGGGCTAAGTCCA |
| | | C |
| 782 | 5248_Human_quadMut_1T_3A_14A_46T_n1 | TGAGGAGGCTGCTAGTGAATATTAACCAAGGTCACCCCAGTTATCTGAGGAGCAAACAGGGGCTAAGTCCA |
| | | C |
| 783 | 5252_Human_quadMut_1A_3T_14A_72A_n1 | AGTGGAGGCTGCTAGTGAATATTAACCAAGGTCACCCCAGTTATCGGAGGAGCAAACAGGGGCTAAGTCCA |
| | | A |
| 784 | 5260_Human_quadMut_1A_3A_37A_46A_n1 | AGAGGAGGCTGCTGGTGAATATTAACCAAGGTCACCACAGTTATCAGAGGAGCAAACAGGGGCTAAGTCCA |
| | | C |
| 785 | 5262_Human_quadMut_1A_3T_37A_62C_n1 | AGTGGAGGCTGCTGGTGAATATTAACCAAGGTCACCACAGTTATCGGAGGAGCAAACAGGGCCTAAGTCCA |
| | | C |
| 786 | 5263_Human_quadMut_1A_3T_37T_72A_n1 | AGTGGAGGCTGCTGGTGAATATTAACCAAGGTCACCTCAGTTATCGGAGGAGCAAACAGGGGCTAAGTCCA |
| | | A |
| 787 | 5269_Human_quadMut_1T_3A_46A_52A_n1 | TGAGGAGGCTGCTGGTGAATATTAACCAAGGTCACCCCAGTTATCAGAGGAACAAACAGGGGCTAAGTCCA |
| | | C |
| 788 | 5271_Human_quadMut_1A_3T_46T_72A_n1 | AGTGGAGGCTGCTGGTGAATATTAACCAAGGTCACCCCAGTTATCTGAGGAGCAAACAGGGGCTAAGTCCA |
| | | A |
| 789 | 5274_Human_quadMut_1A_3A_48G_72A_n1 | AGAGGAGGCTGCTGGTGAATATTAACCAAGGTCACCCCAGTTATCGGGGGAGCAAACAGGGGCTAAGTCCA |
| | | A |
| 790 | 5275_Human_quadMut_1T_3A_52T_62C_n1 | TGAGGAGGCTGCTGGTGAATATTAACCAAGGTCACCCCAGTTATCGGAGGATCAAACAGGGCCTAAGTCCA |
| | | C |
| 791 | 5283_Human_quadMut_1A_8C_14A_52A_n1 | AGGGGAGCCTGCTAGTGAATATTAACCAAGGTCACCCCAGTTATCGGAGGAACAAACAGGGGCTAAGTCCA |
| | | C |
| 792 | 5286_Human_quadMut_1A_8A_35G_37A_n1 | AGGGGAGACTGCTGGTGAATATTAACCAAGGTCAGCACAGTTATCGGAGGAGCAAACAGGGGCTAAGTCCA |
| | | C |
| 793 | 5287_Human_quadMut_1T_8T_35A_45G_n1 | TGGGGAGTCTGCTGGTGAATATTAACCAAGGTCAACCCAGTTATGGGAGGAGCAAACAGGGGCTAAGTCCA |
| | | C |
| 794 | 5289_Human_quadMut_1A_8C_35A_48T_n1 | AGGGGAGCCTGCTGGTGAATATTAACCAAGGTCAACCCAGTTATCGGTGGAGCAAACAGGGGCTAAGTCCA |
| | | C |
| 795 | 5296_Human_quadMut_1A_8C_37T_62C_n1 | AGGGGAGCCTGCTGGTGAATATTAACCAAGGTCACCTCAGTTATCGGAGGAGCAAACAGGGCCTAAGTCCA |
| | | C |
| 796 | 5304_Human_quadMut_1A_8A_46A_52T_n1 | AGGGGAGACTGCTGGTGAATATTAACCAAGGTCACCCCAGTTATCAGAGGATCAAACAGGGGCTAAGTCCA |
| | | C |
| 797 | 5313_Human_quadMut_1T_14T_35T_37T_n1 | TGGGGAGGCTGCTTGTGAATATTAACCAAGGTCATCTCAGTTATCGGAGGAGCAAACAGGGGCTAAGTCCA |
| | | C |
| 798 | 5322_Human_quadMut_1A_14A_37A_52T_n1 | AGGGGAGGCTGCTAGTGAATATTAACCAAGGTCACCACAGTTATCGGAGGATCAAACAGGGGCTAAGTCCA |
| | | C |
| 799 | 5324_Human_quadMut_1A_14A_37T_72T_n1 | AGGGGAGGCTGCTAGTGAATATTAACCAAGGTCACCTCAGTTATCGGAGGAGCAAACAGGGGCTAAGTCCA |
| | | T |
| 800 | 5331_Human_quadMut_1T_14T_46T_52T_n1 | TGGGGAGGCTGCTTGTGAATATTAACCAAGGTCACCCCAGTTATCTGAGGATCAAACAGGGGCTAAGTCCA |
| | | C |
| 801 | 5332_Human_quadMut_1A_14A_46A_62C_n1 | AGGGGAGGCTGCTAGTGAATATTAACCAAGGTCACCCCAGTTATCAGAGGAGCAAACAGGGCCTAAGTCCA |
| | | C |
| 802 | 5335_Human_quadMut_1T_14T_52A_62A_n1 | TGGGGAGGCTGCTTGTGAATATTAACCAAGGTCACCCCAGTTATCGGAGGAACAAACAGGGACTAAGTCCA |
| | | C |
| 803 | 5338_Human_quadMut_1T_35G_37A_45T_n1 | TGGGGAGGCTGCTGGTGAATATTAACCAAGGTCAGCACAGTTATTGGAGGAGCAAACAGGGGCTAAGTCCA |
| | | C |
| 804 | 5339_Human_quadMut_1A_35T_37T_46T_n1 | AGGGGAGGCTGCTGGTGAATATTAACCAAGGTCATCTCAGTTATCTGAGGAGCAAACAGGGGCTAAGTCCA |
| | | C |
| 805 | 5342_Human_quadMut_1A_35G_37T_62C_n1 | AGGGGAGGCTGCTGGTGAATATTAACCAAGGTCAGCTCAGTTATCGGAGGAGCAAACAGGGCCTAAGTCCA |
| | | C |
| 806 | 5348_Human_quadMut_1T_35G_46T_48T_n1 | TGGGGAGGCTGCTGGTGAATATTAACCAAGGTCAGCCCAGTTATCTGTGGAGCAAACAGGGGCTAAGTCCA |
| | | C |
| 807 | 5349_Human_quadMut_1A_35G_46A_52T_n1 | AGGGGAGGCTGCTGGTGAATATTAACCAAGGTCAGCCCAGTTATCAGAGGATCAAACAGGGGCTAAGTCCA |
| | | C |
| 808 | 5350_Human_quadMut_1T_35G_46A_72T_n1 | TGGGGAGGCTGCTGGTGAATATTAACCAAGGTCAGCCCAGTTATCAGAGGAGCAAACAGGGGCTAAGTCCA |
| | | T |
| 809 | 5353_Human_quadMut_1T_35G_48G_72T_n1 | TGGGGAGGCTGCTGGTGAATATTAACCAAGGTCAGCCCAGITATCGGGGGAGCAAACAGGGGCTAAGTCCA |
| | | T |
| 810 | 5354_Human_quadMut_1A_35A_52C_62C_n1 | AGGGGAGGCTGCTGGTGAATATTAACCAAGGTCAACCCAGTTATCGGAGGACCAAACAGGGCCTAAGTCCA |
| | | C |
| 811 | 5356_Human_quadMut_1A_35T_62C_72A_n1 | AGGGGAGGCTGCTGGTGAATATTAACCAAGGTCATCCCAGTTATCGGAGGAGCAAACAGGGCCTAAGTCCA |
| | | A |
| 812 | 5358_Human_quadMut_1A_37A_45A_52T_n1 | AGGGGAGGCTGCTGGTGAATATTAACCAAGGTCACCACAGTTATAGGAGGATCAAACAGGGGCTAAGTCCA |
| | | C |
| 813 | 5361_Human_quadMut_1A_37A_46T_48T_n1 | AGGGGAGGCTGCTGGTGAATATTAACCAAGGTCACCACAGTTATCTGTGGAGCAAACAGGGGCTAAGTCCA |
| | | C |
| 814 | 5362_Human_quadMut_1T_37T_46T_52A_n1 | TGGGGAGGCTGCTGGTGAATATTAACCAAGGTCACCTCAGTTATCTGAGGAACAAACAGGGGCTAAGTCCA |
| | | C |
| 815 | 5372_Human_quadMut_1A_45G_46A_52A_n1 | AGGGGAGGCTGCTGGTGAATATTAACCAAGGTCACCCCAGTTATGAGAGGAACAAACAGGGGCTAAGTCCA |
| | | C |
| 816 | 5377_Human_quadMut_1A_45G_48G_72T_n1 | AGGGGAGGCTGCTGGTGAATATTAACCAAGGTCACCCCAGTTATGGGGGGAGCAAACAGGGGCTAAGTCCA |
| | | T |
| 817 | 5378_Human_quadMut_1T_45A_52A_62T_n1 | TGGGGAGGCTGCTGGTGAATATTAACCAAGGTCACCCCAGTTATAGGAGGAACAAACAGGGTCTAAGTCCA |
| | | C |
| 818 | 5381_Human_quadMut_1A_46A_48G_62T_n1 | AGGGGAGGCTGCTGGTGAATATTAACCAAGGTCACCCCAGTTATCAGGGGAGCAAACAGGGTCTAAGTCCA |
| | | C |
| 819 | 5382_Human_quadMut_1A_46A_48G_72A_n1 | AGGGGAGGCTGCTGGTGAATATTAACCAAGGTCACCCCAGTTATCAGGGGAGCAAACAGGGGCTAAGTCCA |
| | | A |
| 820 | 5384_Human_quadMut_1T_46T_52T_72A_n1 | TGGGGAGGCTGCTGGTGAATATTAACCAAGGTCACCCCAGTTATCTGAGGATCAAACAGGGGCTAAGTCCA |
| | | A |
| 821 | 5386_Human_quadMut_1A_48G_52T_62C_n1 | AGGGGAGGCTGCTGGTGAATATTAACCAAGGTCACCCCAGTTATCGGGGGATCAAACAGGGCCTAAGTCCA |
| | | C |
| 822 | 5388_Human_quadMut_1A_48G_62C_72T_n1 | AGGGGAGGCTGCTGGTGAATATTAACCAAGGTCACCCCAGTTATCGGGGGAGCAAACAGGGCCTAAGTCCA |
| | | T |
| 823 | 5392_Human_quadMut_3A_8A_14T_45G_n1 | GGAGGAGACTGCTTGTGAATATTAACCAAGGTCACCCCAGTTATGGGAGGAGCAAACAGGGGCTAAGTCCA |
| | | C |
| 824 | 5398_Human_quadMut_3A_8A_35T_37T_n1 | GGAGGAGACTGCTGGTGAATATTAACCAAGGTCATCTCAGTTATCGGAGGAGCAAACAGGGGCTAAGTCCA |
| | | C |
| 825 | 5406_Human_quadMut_3A_8C_37T_46A_n1 | GGAGGAGCCTGCTGGTGAATATTAACCAAGGTCACCTCAGTTATCAGAGGAGCAAACAGGGGCTAAGTCCA |
| | | C |
| 826 | 5407_Human_quadMut_3T_8C_37T_48G_n1 | GGTGGAGCCTGCTGGTGAATATTAACCAAGGTCACCTCAGTTATCGGGGGAGCAAACAGGGGCTAAGTCCA |
| | | C |
| 827 | 5408_Human_quadMut_3T_8A_37T_52T_n1 | GGTGGAGACTGCTGGTGAATATTAACCAAGGTCACCTCAGTTATCGGAGGATCAAACAGGGGCTAAGTCCA |
| | | C |
| 828 | 5409_Human_quadMut_3T_8T_37A_62A_n1 | GGTGGAGTCTGCTGGTGAATATTAACCAAGGTCACCACAGTTATCGGAGGAGCAAACAGGGACTAAGTCCA |
| | | C |
| 829 | 5423_Human_quadMut_3A_8A_52T_62A_n1 | GGAGGAGACTGCTGGTGAATATTAACCAAGGTCACCCCAGTTATCGGAGGATCAAACAGGGACTAAGTCCA |
| | | C |
| 830 | 5424_Human_quadMut_3A_8A_52T_72G_n1 | GGAGGAGACTGCTGGTGAATATTAACCAAGGTCACCCCAGTTATCGGAGGATCAAACAGGGGCTAAGTCCA |
| | | G |
| 831 | 5425_Human_quadMut_3A_8T_62T_72A_n1 | GGAGGAGTCTGCTGGTGAATATTAACCAAGGTCACCCCAGTTATCGGAGGAGCAAACAGGGTCTAAGTCCA |
| | | A |
| 832 | 5430_Human_quadMut_3A_14T_35G_52T_n1 | GGAGGAGGCTGCTTGTGAATATTAACCAAGGTCAGCCCAGTTATCGGAGGATCAAACAGGGGCTAAGTCCA |
| | | C |
| 833 | 5435_Human_quadMut_3T_14T_37A_48G_n1 | GGTGGAGGCTGCTTGTGAATATTAACCAAGGTCACCACAGTTATCGGGGGAGCAAACAGGGGCTAAGTCCA |
| | | C |
| 834 | 5436_Human_quadMut_3A_14A_37T_52T_n1 | GGAGGAGGCTGCTAGTGAATATTAACCAAGGTCACCTCAGTTATCGGAGGATCAAACAGGGGCTAAGTCCA |
| | | C |
| 835 | 5443_Human_quadMut_3T_14A_45T_72A_n1 | GGTGGAGGCTGCTAGTGAATATTAACCAAGGTCACCCCAGTTATTGGAGGAGCAAACAGGGGCTAAGTCCA |
| | | A |
| 836 | 5444_Human_quadMut_3A_14A_46A_48T_n1 | GGAGGAGGCTGCTAGTGAATATTAACCAAGGTCACCCCAGTTATCAGTGGAGCAAACAGGGGCTAAGTCCA |
| | | C |
| 837 | 5447_Human_quadMut_3A_14A_46A_72A_n1 | GGAGGAGGCTGCTAGTGAATATTAACCAAGGTCACCCCAGTTATCAGAGGAGCAAACAGGGGCTAAGTCCA |
| | | A |
| 838 | 5450_Human_quadMut_3A_14T_48T_72G_n1 | GGAGGAGGCTGCTTGTGAATATTAACCAAGGTCACCCCAGTTATCGGTGGAGCAAACAGGGGCTAAGTCCA |
| | | G |
| 839 | 5451_Human_quadMut_3A_14A_52A_62C_n1 | GGAGGAGGCTGCTAGTGAATATTAACCAAGGTCACCCCAGTTATCGGAGGAACAAACAGGGCCTAAGTCCA |
| | | C |
| 840 | 5455_Human_quadMut_3A_35A_37A_46A_n1 | GGAGGAGGCTGCTGGTGAATATTAACCAAGGTCAACACAGTTATCAGAGGAGCAAACAGGGGCTAAGTCCA |
| | | C |
| 841 | 5456_Human_quadMut_3A_35A_37A_48G_n1 | GGAGGAGGCTGCTGGTGAATATTAACCAAGGTCAACACAGTTATCGGGGGAGCAAACAGGGGCTAAGTCCA |
| | | C |
| 842 | 5457_Human_quadMut_3T_35T_37T_52C_n1 | GGTGGAGGCTGCTGGTGAATATTAACCAAGGTCATCTCAGTTATCGGAGGACCAAACAGGGGCTAAGTCCA |
| | | C |
| 843 | 5465_Human_quadMut_3T_35T_46A_48G_n1 | GGTGGAGGCTGCTGGTGAATATTAACCAAGGTCATCCCAGTTATCAGGGGAGCAAACAGGGGCTAAGTCCA |
| | | C |
| 844 | 5467_Human_quadMut_3T_35A_46A_62C_n1 | GGTGGAGGCTGCTGGTGAATATTAACCAAGGTCAACCCAGTTATCAGAGGAGCAAACAGGGCCTAAGTCCA |
| | | C |
| 845 | 5468_Human_quadMut_3A_35A_46T_72T_n1 | GGAGGAGGCTGCTGGTGAATATTAACCAAGGTCAACCCAGTTATCTGAGGAGCAAACAGGGGCTAAGTCCA |
| | | T |
| 846 | 5481_Human_quadMut_3T_37T_46T_52T_n1 | GGTGGAGGCTGCTGGTGAATATTAACCAAGGTCACCTCAGTTATCTGAGGATCAAACAGGGGCTAAGTCCA |
| | | C |
| 847 | 5482_Human_quadMut_3T_37T_46A_62T_n1 | GGTGGAGGCTGCTGGTGAATATTAACCAAGGTCACCTCAGTTATCAGAGGAGCAAACAGGGTCTAAGTCCA |
| | | C |
| 848 | 5485_Human_quadMut_3A_37A_48G_62C_n1 | GGAGGAGGCTGCTGGTGAATATTAACCAAGGTCACCACAGTTATCGGGGGAGCAAACAGGGCCTAAGTCCA |
| | | C |
| 849 | 5487_Human_quadMut_3T_37A_52T_62C_n1 | GGTGGAGGCTGCTGGTGAATATTAACCAAGGTCACCACAGTTATCGGAGGATCAAACAGGGCCTAAGTCCA |
| | | C |
| 850 | 5488_Human_quadMut_3A_37A_52C_72A_n1 | GGAGGAGGCTGCTGGTGAATATTAACCAAGGTCACCACAGTTATCGGAGGACCAAACAGGGGCTAAGTCCA |
| | | A |
| 851 | 5491_Human_quadMut_3A_45G_46T_52C_n1 | GGAGGAGGCTGCTGGTGAATATTAACCAAGGTCACCCCAGTTATGTGAGGACCAAACAGGGGCTAAGTCCA |
| | | C |
| 852 | 5492_Human_quadMut_3A_45A_46A_62T_n1 | GGAGGAGGCTGCTGGTGAATATTAACCAAGGTCACCCCAGTTATAAGAGGAGCAAACAGGGTCTAAGTCCA |
| | | C |
| 853 | 5500_Human_quadMut_3A_46T_48G_52T_n1 | GGAGGAGGCTGCTGGTGAATATTAACCAAGGTCACCCCAGTTATCTGGGGATCAAACAGGGGCTAAGTCCA |
| | | C |
| 854 | 5503_Human_quadMut_3A_46A_52T_62C_n1 | GGAGGAGGCTGCTGGTGAATATTAACCAAGGTCACCCCAGTTATCAGAGGATCAAACAGGGCCTAAGTCCA |
| | | C |
| 855 | 5505_Human_quadMut_3A_46A_62C_72A_n1 | GGAGGAGGCTGCTGGTGAATATTAACCAAGGTCACCCCAGTTATCAGAGGAGCAAACAGGGCCTAAGTCCA |
| | | A |
| 856 | 5509_Human_quadMut_8A_14A_35A_37T_n1 | GGGGGAGACTGCTAGTGAATATTAACCAAGGTCAACTCAGTTATCGGAGGAGCAAACAGGGGCTAAGTCCA |
| | | C |
| 857 | 5513_Human_quadMut_8C_14T_35A_62T_n1 | GGGGGAGCCTGCTTGTGAATATTAACCAAGGTCAACCCAGTTATCGGAGGAGCAAACAGGGTCTAAGTCCA |
| | | C |
| 858 | 5517_Human_quadMut_8T_14T_37T_48G_n1 | GGGGGAGTCTGCTTGTGAATATTAACCAAGGTCACCTCAGTTATCGGGGGAGCAAACAGGGGCTAAGTCCA |
| | | C |
| 859 | 5519_Human_quadMut_8A_14A_37A_62A_n1 | GGGGGAGACTGCTAGTGAATATTAACCAAGGTCACCACAGTTATCGGAGGAGCAAACAGGGACTAAGTCCA |
| | | C |
| 860 | 5526_Human_quadMut_8C_14T_46A_48T_n1 | GGGGGAGCCTGCTTGTGAATATTAACCAAGGTCACCCCAGTTATCAGTGGAGCAAACAGGGGCTAAGTCCA |
| | | C |
| 861 | 5527_Human_quadMut_8T_14T_46A_52T_n1 | GGGGGAGTCTGCTTGTGAATATTAACCAAGGTCACCCCAGTTATCAGAGGATCAAACAGGGGCTAAGTCCA |
| | | C |
| 862 | 5531_Human_quadMut_8C_14T_48T_62T_n1 | GGGGGAGCCTGCTTGTGAATATTAACCAAGGTCACCCCAGTTATCGGTGGAGCAAACAGGGTCTAAGTCCA |
| | | C |
| 863 | 5532_Human_quadMut_8C_14T_48G_72A_n1 | GGGGGAGCCTGCTTGTGAATATTAACCAAGGTCACCCCAGTTATCGGGGGAGCAAACAGGGGCTAAGTCCA |
| | | A |
| 864 | 5533_Human_quadMut_8T_14T_52A_62C_n1 | GGGGGAGTCTGCTTGTGAATATTAACCAAGGTCACCCCAGTTATCGGAGGAACAAACAGGGCCTAAGTCCA |
| | | C |
| 865 | 5537_Human_quadMut_8A_35A_37A_46A_n1 | GGGGGAGACTGCTGGTGAATATTAACCAAGGTCAACACAGTTATCAGAGGAGCAAACAGGGGCTAAGTCCA |
| | | C |
| 866 | 5540_Human_quadMut_8C_35T_37T_62A_n1 | GGGGGAGCCTGCTGGTGAATATTAACCAAGGTCATCTCAGTTATCGGAGGAGCAAACAGGGACTAAGTCCA |
| | | C |
| 867 | 5546_Human_quadMut_8C_35T_46A_48T_n1 | GGGGGAGCCTGCTGGTGAATATTAACCAAGGTCATCCCAGTTATCAGTGGAGCAAACAGGGGCTAAGTCCA |
| | | C |
| 868 | 5547_Human_quadMut_8C_35G_46A_52A_n1 | GGGGGAGCCTGCTGGTGAATATTAACCAAGGTCAGCCCAGTTATCAGAGGAACAAACAGGGGCTAAGTCCA |
| | | C |
| 869 | 5548_Human_quadMut_8T_35A_46A_62T_n1 | GGGGGAGTCTGCTGGTGAATATTAACCAAGGTCAACCCAGTTATCAGAGGAGCAAACAGGGTCTAAGTCCA |
| | | C |
| 870 | 5551_Human_quadMut_8C_35T_48G_62T_n1 | GGGGGAGCCTGCTGGTGAATATTAACCAAGGTCATCCCAGTTATCGGGGGAGCAAACAGGGTCTAAGTCCA |
| | | C |
| 872 | 5553_Human_quadMut_8C_35A_52T_62A_n1 | GGGGGAGCCTGCTGGTGAATATTAACCAAGGTCAACCCAGTTATCGGAGGATCAAACAGGGACTAAGTCCA |
| | | C |
| 873 | 5554_Human_quadMut_8A_35T_52A_72A_n1 | GGGGGAGACTGCTGGTGAATATTAACCAAGGTCATCCCAGTTATCGGAGGAACAAACAGGGGCTAAGTCCA |
| | | A |
| 874 | 5556_Human_quadMut_8A_37T_45T_46A_n1 | GGGGGAGACTGCTGGTGAATATTAACCAAGGTCACCTCAGTTATTAGAGGAGCAAACAGGGGCTAAGTCCA |
| | | C |
| 875 | 5557_Human_quadMut_8C_37T_45G_48T_n1 | GGGGGAGCCTGCTGGTGAATATTAACCAAGGTCACCTCAGTTATGGGTGGAGCAAACAGGGGCTAAGTCCA |
| | | C |
| 876 | 5558_Human_quadMut_8A_37A_45G_52A_n1 | GGGGGAGACTGCTGGTGAATATTAACCAAGGTCACCACAGTTATGGGAGGAACAAACAGGGGCTAAGTCCA |
| | | C |
| 877 | 5561_Human_quadMut_8C_37A_46T_48G_n1 | GGGGGAGCCTGCTGGTGAATATTAACCAAGGTCACCACAGTTATCTGGGGAGCAAACAGGGGCTAAGTCCA |
| | | C |
| 878 | 5562_Human_quadMut_8C_37A_46T_52T_n1 | GGGGGAGCCTGCTGGTGAATATTAACCAAGGTCACCACAGTTATCTGAGGATCAAACAGGGGCTAAGTCCA |
| | | C |
| 879 | 5563_Human_quadMut_8C_37T_46A_62T_n1 | GGGGGAGCCTGCTGGTGAATATTAACCAAGGTCACCTCAGTTATCAGAGGAGCAAACAGGGTCTAAGTCCA |
| | | C |
| 880 | 5566_Human_quadMut_8T_37T_48G_62C_n1 | GGGGGAGTCTGCTGGTGAATATTAACCAAGGTCACCTCAGTTATCGGGGGAGCAAACAGGGCCTAAGTCCA |
| | | C |
| 881 | 5567_Human_quadMut_8A_37A_52A_62T_n1 | GGGGGAGACTGCTGGTGAATATTAACCAAGGTCACCACAGTTATCGGAGGAACAAACAGGGTCTAAGTCCA |
| | | C |
| 882 | 5568_Human_quadMut_8C_37T_52A_72A_n1 | GGGGGAGCCTGCTGGTGAATATTAACCAAGGTCACCTCAGTTATCGGAGGAACAAACAGGGGCTAAGTCCA |
| | | A |
| 883 | 5569_Human_quadMut_8A_37T_62T_72A_n1 | GGGGGAGACTGCTGGTGAATATTAACCAAGGTCACCTCAGTTATCGGAGGAGCAAACAGGGTCTAAGTCCA |
| | | A |
| 884 | 5572_Human_quadMut_8T_45T_46T_72A_n1 | GGGGGAGTCTGCTGGTGAATATTAACCAAGGTCACCCCAGTTATTTGAGGAGCAAACAGGGGCTAAGTCCA |
| | | A |
| 885 | 5573_Human_quadMut_8T_45G_48T_52A_n1 | GGGGGAGTCTGCTGGTGAATATTAACCAAGGTCACCCCAGTTATGGGTGGAACAAACAGGGGCTAAGTCCA |
| | | C |
| 886 | 5576_Human_quadMut_8C_45T_52T_62A_n1 | GGGGGAGCCTGCTGGTGAATATTAACCAAGGTCACCCCAGTTATTGGAGGATCAAACAGGGACTAAGTCCA |
| | | C |
| 887 | 5580_Human_quadMut_8C_46T_48G_62T_n1 | GGGGGAGCCTGCTGGTGAATATTAACCAAGGTCACCCCAGTTATCTGGGGAGCAAACAGGGTCTAAGTCCA |
| | | C |
| 888 | 5581_Human_quadMut_8A_46T_52C_62C_n1 | GGGGGAGACTGCTGGTGAATATTAACCAAGGTCACCCCAGTTATCTGAGGACCAAACAGGGCCTAAGTCCA |
| | | C |
| 889 | 5584_Human_quadMut_8C_48G_52A_62T_n1 | GGGGGAGCCTGCTGGTGAATATTAACCAAGGTCACCCCAGTTATCGGGGGAACAAACAGGGTCTAAGTCCA |
| | | C |
| 890 | 5590_Human_quadMut_14A_35T_37T_48G_n1 | GGGGGAGGCTGCTAGTGAATATTAACCAAGGTCATCTCAGTTATCGGGGGAGCAAACAGGGGCTAAGTCCA |
| | | C |
| 891 | 5592_Human_quadMut_14A_35G_37T_62T_n1 | GGGGGAGGCTGCTAGTGAATATTAACCAAGGTCAGCTCAGTTATCGGAGGAGCAAACAGGGTCTAAGTCCA |
| | | C |
| 892 | 5594_Human_quadMut_14A_35G_45G_46T_n1 | GGGGGAGGCTGCTAGTGAATATTAACCAAGGTCAGCCCAGTTATGTGAGGAGCAAACAGGGGCTAAGTCCA |
| | | C |
| 893 | 5599_Human_quadMut_14A_35A_46A_48G_n1 | GGGGGAGGCTGCTAGTGAATATTAACCAAGGTCAACCCAGTTATCAGGGGAGCAAACAGGGGCTAAGTCCA |
| | | C |
| 894 | 5601_Human_quadMut_14A_35T_46T_62C_n1 | GGGGGAGGCTGCTAGTGAATATTAACCAAGGTCATCCCAGTTATCTGAGGAGCAAACAGGGCCTAAGTCCA |
| | | C |
| 895 | 5604_Human_quadMut_14A_35A_48G_62T_n1 | GGGGGAGGCTGCTAGTGAATATTAACCAAGGTCAACCCAGTTATCGGGGGAGCAAACAGGGTCTAAGTCCA |
| | | C |
| 896 | 5606_Human_quadMut_14T_35A_52A_62C_n1 | GGGGGAGGCTGCTTGTGAATATTAACCAAGGTCAACCCAGTTATCGGAGGAACAAACAGGGCCTAAGTCCA |
| | | C |
| 897 | 5608_Human_quadMut_14A_35A_62T_72T_n1 | GGGGGAGGCTGCTAGTGAATATTAACCAAGGTCAACCCAGTTATCGGAGGAGCAAACAGGGTCTAAGTCCA |
| | | T |
| 898 | 5618_Human_quadMut_14A_37T_52A_62T_n1 | GGGGGAGGCTGCTAGTGAATATTAACCAAGGTCACCTCAGTTATCGGAGGAACAAACAGGGTCTAAGTCCA |
| | | C |
| 899 | 5633_Human_quadMut_14A_46T_48G_72T_n1 | GGGGGAGGCTGCTAGTGAATATTAACCAAGGTCACCCCAGTTATCTGGGGAGCAAACAGGGGCTAAGTCCA |
| | | T |
| 900 | 5634_Human_quadMut_14A_46A_52C_62C_n1 | GGGGGAGGCTGCTAGTGAATATTAACCAAGGTCACCCCAGTTATCAGAGGACCAAACAGGGCCTAAGTCCA |
| | | C |
| 901 | 5635_Human_quadMut_14A_46T_52T_72A_n1 | GGGGGAGGCTGCTAGTGAATATTAACCAAGGTCACCCCAGTTATCTGAGGATCAAACAGGGGCTAAGTCCA |
| | | A |
| 902 | 5640_Human_quadMut_35T_37T_45T_46A_n1 | GGGGGAGGCTGCTGGTGAATATTAACCAAGGTCATCTCAGTTATTAGAGGAGCAAACAGGGGCTAAGTCCA |
| | | C |
| 903 | 5641_Human_quadMut_35T_37A_45A_48T_n1 | GGGGGAGGCTGCTGGTGAATATTAACCAAGGTCATCACAGTTATAGGTGGAGCAAACAGGGGCTAAGTCCA |
| | | C |
| 904 | 5642_Human_quadMut_35T_37T_45T_52T_n1 | GGGGGAGGCTGCTGGTGAATATTAACCAAGGTCATCTCAGTTATTGGAGGATCAAACAGGGGCTAAGTCCA |
| | | C |
| 905 | 5645_Human_quadMut_35A_37A_46T_48G_n1 | GGGGGAGGCTGCTGGTGAATATTAACCAAGGTCAACACAGTTATCTGGGGAGCAAACAGGGGCTAAGTCCA |
| | | C |
| 906 | 5646_Human_quadMut_35G_37A_46A_52C_n1 | GGGGGAGGCTGCTGGTGAATATTAACCAAGGTCAGCACAGTTATCAGAGGACCAAACAGGGGCTAAGTCCA |
| | | C |
| 907 | 5647_Human_quadMut_35G_37T_46A_62T_n1 | GGGGGAGGCTGCTGGTGAATATTAACCAAGGTCAGCTCAGTTATCAGAGGAGCAAACAGGGTCTAAGTCCA |
| | | C |
| 908 | 5648_Human_quadMut_35A_37A_46T_72G_n1 | GGGGGAGGCTGCTGGTGAATATTAACCAAGGTCAACACAGTTATCTGAGGAGCAAACAGGGGCTAAGTCCA |
| | | G |
| 909 | 5649_Human_quadMut_35A_37A_48T_52T_n1 | GGGGGAGGCTGCTGGTGAATATTAACCAAGGTCAACACAGTTATCGGTGGATCAAACAGGGGCTAAGTCCA |
| | | C |
| 910 | 5652_Human_quadMut_35A_37A_52T_62A_n1 | GGGGGAGGCTGCTGGTGAATATTAACCAAGGTCAACACAGTTATCGGAGGATCAAACAGGGACTAAGTCCA |
| | | C |
| 911 | 5653_Human_quadMut_35A_37T_52T_72G_n1 | GGGGGAGGCTGCTGGTGAATATTAACCAAGGTCAACTCAGTTATCGGAGGATCAAACAGGGGCTAAGTCCA |
| | | G |
| 912 | 5654_Human_quadMut_35T_37T_62T_72T_n1 | GGGGGAGGCTGCTGGTGAATATTAACCAAGGTCATCTCAGTTATCGGAGGAGCAAACAGGGTCTAAGTCCA |
| | | T |
| 913 | 5655_Human_quadMut_35A_45T_46T_48T_n1 | GGGGGAGGCTGCTGGTGAATATTAACCAAGGTCAACCCAGTTATTTGTGGAGCAAACAGGGGCTAAGTCCA |
| | | C |
| 914 | 5656_Human_quadMut_35A_45T_46T_52T_n1 | GGGGGAGGCTGCTGGTGAATATTAACCAAGGTCAACCCAGTTATTTGAGGATCAAACAGGGGCTAAGTCCA |
| | | C |
| 915 | 5658_Human_quadMut_35G_45G_46A_72A_n1 | GGGGGAGGCTGCTGGTGAATATTAACCAAGGTCAGCCCAGTTATGAGAGGAGCAAACAGGGGCTAAGTCCA |
| | | A |
| 916 | 5660_Human_quadMut_35A_45A_48G_62T_n1 | GGGGGAGGCTGCTGGTGAATATTAACCAAGGTCAACCCAGTTATAGGGGGAGCAAACAGGGTCTAAGTCCA |
| | | C |
| 917 | 5661_Human_quadMut_35T_45T_48T_72A_n1 | GGGGGAGGCTGCTGGTGAATATTAACCAAGGTCATCCCAGTTATTGGTGGAGCAAACAGGGGCTAAGTCCA |
| | | A |
| 918 | 5662_Human_quadMut_35G_45T_52A_62T_n1 | GGGGGAGGCTGCTGGTGAATATTAACCAAGGTCAGCCCAGTTATTGGAGGAACAAACAGGGTCTAAGTCCA |
| | | C |
| 919 | 5665_Human_quadMut_35A_46A_48T_52A_n1 | GGGGGAGGCTGCTGGTGAATATTAACCAAGGTCAACCCAGTTATCAGTGGAACAAACAGGGGCTAAGTCCA |
| | | C |
| 920 | 5666_Human_quadMut_35A_46A_48G_62C_n1 | GGGGGAGGCTGCTGGTGAATATTAACCAAGGTCAACCCAGTTATCAGGGGAGCAAACAGGGCCTAAGTCCA |
| | | C |
| 921 | 5668_Human_quadMut_35A_46A_52T_62T_n1 | GGGGGAGGCTGCTGGTGAATATTAACCAAGGTCAACCCAGTTATCAGAGGATCAAACAGGGTCTAAGTCCA |
| | | C |
| 922 | 5669_Human_quadMut_35T_48G_52A_62T_n1 | GGGGGAGGCTGCTGGTGAATATTAACCAAGGTCATCCCAGTTATCGGGGGAACAAACAGGGTCTAAGTCCA |
| | | C |
| 923 | 5670_Human_quadMut_35G_48G_52C_72G_n1 | GGGGGAGGCTGCTGGTGAATATTAACCAAGGTCAGCCCAGTTATCGGGGGACCAAACAGGGGCTAAGTCCA |
| | | G |
| 924 | 5672_Human_quadMut_35A_52C_62T_72G_n1 | GGGGGAGGCTGCTGGTGAATATTAACCAAGGTCAACCCAGTTATCGGAGGACCAAACAGGGTCTAAGTCCA |
| | | G |
| 925 | 5674_Human_quadMut_37T_45G_46T_52A_n1 | GGGGGAGGCTGCTGGTGAATATTAACCAAGGTCACCTCAGTTATGTGAGGAACAAACAGGGGCTAAGTCCA |
| | | C |
| 926 | 5675_Human_quadMut_37A_45G_46A_62T_n1 | GGGGGAGGCTGCTGGTGAATATTAACCAAGGTCACCACAGTTATGAGAGGAGCAAACAGGGTCTAAGTCCA |
| | | C |
| 927 | 5683_Human_quadMut_37T_46A_48G_52A_n1 | GGGGGAGGCTGCTGGTGAATATTAACCAAGGTCACCTCAGTTATCAGGGGAACAAACAGGGGCTAAGTCCA |
| | | C |
| 928 | 5685_Human_quadMut_37A_46A_52C_62T_n1 | GGGGGAGGCTGCTGGTGAATATTAACCAAGGTCACCACAGTTATCAGAGGACCAAACAGGGTCTAAGTCCA |
| | | C |
| 929 | 5687_Human_quadMut_37T_46T_62T_72T_n1 | GGGGGAGGCTGCTGGTGAATATTAACCAAGGTCACCTCAGTTATCTGAGGAGCAAACAGGGTCTAAGTCCA |
| | | T |
| 930 | 5689_Human_quadMut_37T_48G_52T_72A_n1 | GGGGGAGGCTGCTGGTGAATATTAACCAAGGTCACCTCAGTTATCGGGGGATCAAACAGGGGCTAAGTCCA |
| | | A |
| 931 | 5690_Human_quadMut_37A_48G_62T_72A_n1 | GGGGGAGGCTGCTGGTGAATATTAACCAAGGTCACCACAGTTATCGGGGGAGCAAACAGGGTCTAAGTCCA |
| | | A |
| 932 | 5691_Human_quadMut_37T_52T_62A_72T_n1 | GGGGGAGGCTGCTGGTGAATATTAACCAAGGTCACCTCAGTTATCGGAGGATCAAACAGGGACTAAGTCCA |
| | | T |
| 933 | 5695_Human_quadMut_45G_46A_52A_62C_n1 | GGGGGAGGCTGCTGGTGAATATTAACCAAGGTCACCCCAGTTATGAGAGGAACAAACAGGGCCTAAGTCCA |
| | | C |
| 934 | 5696_Human_quadMut_45G_46A_52A_72G_n1 | GGGGGAGGCTGCTGGTGAATATTAACCAAGGTCACCCCAGTTATGAGAGGAACAAACAGGGGCTAAGTCCA |
| | | G |
| 935 | 5702_Human_quadMut_46A_48G_52A_62A_n1 | GGGGGAGGCTGCTGGTGAATATTAACCAAGGTCACCCCAGTTATCAGGGGAACAAACAGGGACTAAGTCCA |
| | | C |
| 936 | 5704_Human_quadMut_46T_48G_62T_72T_n1 | GGGGGAGGCTGCTGGTGAATATTAACCAAGGTCACCCCAGTTATCTGGGGAGCAAACAGGGTCTAAGTCCA |
| | | T |
| 937 | 5705_Human_quadMut_46T_52C_62T_72A_n1 | GGGGGAGGCTGCTGGTGAATATTAACCAAGGTCACCCCAGTTATCTGAGGACCAAACAGGGTCTAAGTCCA |
| | | A |
| 938 | 5708_Human_quadMut_1T_3T_8T_37T_n1 | TGTGGAGTCTGCTGGTGAATATTAACCAAGGTCACCTCAGTTATCGGAGGAGCAAACAGGGGCTAAGTCCA |
| | | C |
| 939 | 5712_Human_quadMut_1A_3T_8C_52A_n1 | AGTGGAGCCTGCTGGTGAATATTAACCAAGGTCACCCCAGTTATCGGAGGAACAAACAGGGGCTAAGTCCA |
| | | C |
| 940 | 5724_Human_quadMut_1A_3A_35T_72A_n1 | AGAGGAGGCTGCTGGTGAATATTAACCAAGGTCATCCCAGTTATCGGAGGAGCAAACAGGGGCTAAGTCCA |
| | | A |
| 941 | 5726_Human_quadMut_1T_3A_37A_48T_n1 | TGAGGAGGCTGCTGGTGAATATTAACCAAGGTCACCACAGTTATCGGTGGAGCAAACAGGGGCTAAGTCCA |
| | | C |
| 942 | 5728_Human_quadMut_1T_3A_37T_62C_n1 | TGAGGAGGCTGCTGGTGAATATTAACCAAGGTCACCTCAGTTATCGGAGGAGCAAACAGGGCCTAAGTCCA |
| | | C |
| 943 | 5730_Human_quadMut_1A_3A_45T_46T_n1 | AGAGGAGGCTGCTGGTGAATATTAACCAAGGTCACCCCAGTTATTTGAGGAGCAAACAGGGGCTAAGTCCA |
| | | C |
| 944 | 5733_Human_quadMut_1T_3A_45A_62T_n1 | TGAGGAGGCTGCTGGTGAATATTAACCAAGGTCACCCCAGTTATAGGAGGAGCAAACAGGGTCTAAGTCCA |
| | | C |
| 945 | 5736_Human_quadMut_1T_3T_46A_52A_n1 | TGTGGAGGCTGCTGGTGAATATTAACCAAGGTCACCCCAGTTATCAGAGGAACAAACAGGGGCTAAGTCCA |
| | | C |
| 946 | 5739_Human_quadMut_1T_3A_48T_52A_n1 | TGAGGAGGCTGCTGGTGAATATTAACCAAGGTCACCCCAGTTATCGGTGGAACAAACAGGGGCTAAGTCCA |
| | | C |
| 947 | 5740_Human_quadMut_1A_3T_48T_62T_n1 | AGTGGAGGCTGCTGGTGAATATTAACCAAGGTCACCCCAGTTATCGGTGGAGCAAACAGGGTCTAAGTCCA |
| | | C |
| 948 | 5743_Human_quadMut_1T_3T_52T_72G_n1 | TGTGGAGGCTGCTGGTGAATATTAACCAAGGTCACCCCAGTTATCGGAGGATCAAACAGGGGCTAAGTCCA |
| | | G |
| 949 | 5745_Human_quadMut_1A_8A_14T_37T_n1 | AGGGGAGACTGCTTGTGAATATTAACCAAGGTCACCTCAGTTATCGGAGGAGCAAACAGGGGCTAAGTCCA |
| | | C |
| 950 | 5754_Human_quadMut_1T_8A_35T_52T_n1 | TGGGGAGACTGCTGGTGAATATTAACCAAGGTCATCCCAGTTATCGGAGGATCAAACAGGGGCTAAGTCCA |
| | | C |
| 951 | 5759_Human_quadMut_1A_8A_37A_48T_n1 | AGGGGAGACTGCTGGTGAATATTAACCAAGGTCACCACAGTTATCGGTGGAGCAAACAGGGGCTAAGTCCA |
| | | C |
| 952 | 5760_Human_quadMut_1A_8C_37T_52A_n1 | AGGGGAGCCTGCTGGTGAATATTAACCAAGGTCACCTCAGTTATCGGAGGAACAAACAGGGGCTAAGTCCA |
| | | C |
| 953 | 5767_Human_quadMut_1A_8C_46T_48G_n1 | AGGGGAGCCTGCTGGTGAATATTAACCAAGGTCACCCCAGTTATCTGGGGAGCAAACAGGGGCTAAGTCCA |
| | | C |
| 954 | 5772_Human_quadMut_1T_8T_48G_62A_n1 | TGGGGAGTCTGCTGGTGAATATTAACCAAGGTCACCCCAGITATCGGGGGAGCAAACAGGGACTAAGTCCA |
| | | C |
| 955 | 5776_Human_quadMut_1A_8A_62T_72A_n1 | AGGGGAGACTGCTGGTGAATATTAACCAAGGTCACCCCAGTTATCGGAGGAGCAAACAGGGTCTAAGTCCA |
| | | A |
| 956 | 5779_Human_quadMut_1A_14T_35T_46A_n1 | AGGGGAGGCTGCTTGTGAATATTAACCAAGGTCATCCCAGTTATCAGAGGAGCAAACAGGGGCTAAGTCCA |
| | | C |
| 957 | 5781_Human_quadMut_1T_14A_35A_52A_n1 | TGGGGAGGCTGCTAGTGAATATTAACCAAGGTCAACCCAGTTATCGGAGGAACAAACAGGGGCTAAGTCCA |
| | | C |
| 958 | 5787_Human_quadMut_1T_14A_37T_52T_n1 | TGGGGAGGCTGCTAGTGAATATTAACCAAGGTCACCTCAGTTATCGGAGGATCAAACAGGGGCTAAGTCCA |
| | | C |
| 959 | 5791_Human_quadMut_1T_14A_45A_62T_n1 | TGGGGAGGCTGCTAGTGAATATTAACCAAGGTCACCCCAGTTATAGGAGGAGCAAACAGGGTCTAAGTCCA |
| | | C |
| 960 | 5793_Human_quadMut_1T_14A_46T_48T_n1 | TGGGGAGGCTGCTAGTGAATATTAACCAAGGTCACCCCAGTTATCTGTGGAGCAAACAGGGGCTAAGTCCA |
| | | C |
| 961 | 5794_Human_quadMut_1T_14A_46A_52T_n1 | TGGGGAGGCTGCTAGTGAATATTAACCAAGGTCACCCCAGTTATCAGAGGATCAAACAGGGGCTAAGTCCA |
| | | C |
| 962 | 5800_Human_quadMut_1T_14A_52T_62T_n1 | TGGGGAGGCTGCTAGTGAATATTAACCAAGGTCACCCCAGTTATCGGAGGATCAAACAGGGTCTAAGTCCA |
| | | C |
| 963 | 5805_Human_quadMut_1T_35G_37T_48G_n1 | TGGGGAGGCTGCTGGTGAATATTAACCAAGGTCAGCTCAGTTATCGGGGGAGCAAACAGGGGCTAAGTCCA |
| | | C |
| 964 | 5809_Human_quadMut_1A_35T_45T_46T_n1 | AGGGGAGGCTGCTGGTGAATATTAACCAAGGTCATCCCAGTTATTTGAGGAGCAAACAGGGGCTAAGTCCA |
| | | C |
| 965 | 5810_Human_quadMut_1A_35T_45G_48G_n1 | AGGGGAGGCTGCTGGTGAATATTAACCAAGGTCATCCCAGTTATGGGGGGAGCAAACAGGGGCTAAGTCCA |
| | | C |
| 966 | 5814_Human_quadMut_1T_35A_46T_48T_n1 | TGGGGAGGCTGCTGGTGAATATTAACCAAGGTCAACCCAGTTATCTGTGGAGCAAACAGGGGCTAAGTCCA |
| | | C |
| 967 | 5815_Human_quadMut_1A_35T_46A_52C_n1 | AGGGGAGGCTGCTGGTGAATATTAACCAAGGTCATCCCAGTTATCAGAGGACCAAACAGGGGCTAAGTCCA |
| | | C |
| 968 | 5816_Human_quadMut_1T_35A_46T_62T_n1 | TGGGGAGGCTGCTGGTGAATATTAACCAAGGTCAACCCAGTTATCTGAGGAGCAAACAGGGTCTAAGTCCA |
| | | C |
| 969 | 5817_Human_quadMut_1A_35A_46A_72T_n1 | AGGGGAGGCTGCTGGTGAATATTAACCAAGGTCAACCCAGTTATCAGAGGAGCAAACAGGGGCTAAGTCCA |
| | | T |
| 970 | 5821_Human_quadMut_1A_35G_52A_62T_n1 | AGGGGAGGCTGCTGGTGAATATTAACCAAGGTCAGCCCAGTTATCGGAGGAACAAACAGGGTCTAAGTCCA |
| | | C |
| 971 | 5823_Human_quadMut_1T_35T_62T_72G_n1 | TGGGGAGGCTGCTGGTGAATATTAACCAAGGTCATCCCAGTTATCGGAGGAGCAAACAGGGTCTAAGTCCA |
| | | G |
| 972 | 5824_Human_quadMut_1A_37A_45G_46A_n1 | AGGGGAGGCTGCTGGTGAATATTAACCAAGGTCACCACAGTTATGAGAGGAGCAAACAGGGGCTAAGTCCA |
| | | C |
| 973 | 5827_Human_quadMut_1A_37T_45G_62C_n1 | AGGGGAGGCTGCTGGTGAATATTAACCAAGGTCACCTCAGTTATGGGAGGAGCAAACAGGGCCTAAGTCCA |
| | | C |
| 974 | 5828_Human_quadMut_1T_37T_45G_72A_n1 | TGGGGAGGCTGCTGGTGAATATTAACCAAGGTCACCTCAGTTATGGGAGGAGCAAACAGGGGCTAAGTCCA |
| | | A |
| 975 | 5829_Human_quadMut_1A_37T_46A_52T_n1 | AGGGGAGGCTGCTGGTGAATATTAACCAAGGTCACCTCAGTTATCAGAGGATCAAACAGGGGCTAAGTCCA |
| | | C |
| 976 | 5832_Human_quadMut_1A_37A_48T_52T_n1 | AGGGGAGGCTGCTGGTGAATATTAACCAAGGTCACCACAGTTATCGGTGGATCAAACAGGGGCTAAGTCCA |
| | | C |
| 977 | 5839_Human_quadMut_1A_45G_46T_52T_n1 | AGGGGAGGCTGCTGGTGAATATTAACCAAGGTCACCCCAGTTATGTGAGGATCAAACAGGGGCTAAGTCCA |
| | | C |
| 978 | 5840_Human_quadMut_1T_45A_46T_62C_n1 | TGGGGAGGCTGCTGGTGAATATTAACCAAGGTCACCCCAGTTATATGAGGAGCAAACAGGGCCTAAGTCCA |
| | | C |
| 979 | 5848_Human_quadMut_1T_46T_48G_52C_n1 | TGGGGAGGCTGCTGGTGAATATTAACCAAGGTCACCCCAGTTATCTGGGGACCAAACAGGGGCTAAGTCCA |
| | | C |
| 980 | 5852_Human_quadMut_1T_46T_52T_72T_n1 | TGGGGAGGCTGCTGGTGAATATTAACCAAGGTCACCCCAGTTATCTGAGGATCAAACAGGGGCTAAGTCCA |
| | | T |
| 981 | 5855_Human_quadMut_1A_48G_52T_72T_n1 | AGGGGAGGCTGCTGGTGAATATTAACCAAGGTCACCCCAGTTATCGGGGGATCAAACAGGGGCTAAGTCCA |
| | | T |
| 982 | 5856_Human_quadMut_1T_48T_62C_72A_n1 | TGGGGAGGCTGCTGGTGAATATTAACCAAGGTCACCCCAGTTATCGGTGGAGCAAACAGGGCCTAAGTCCA |
| | | A |
| 983 | 5866_Human_quadMut_3T_8A_35T_46A_n1 | GGTGGAGACTGCTGGTGAATATTAACCAAGGTCATCCCAGTTATCAGAGGAGCAAACAGGGGCTAAGTCCA |
| | | C |
| 984 | 5867_Human_quadMut_3A_8A_35T_48T_n1 | GGAGGAGACTGCTGGTGAATATTAACCAAGGTCATCCCAGTTATCGGTGGAGCAAACAGGGGCTAAGTCCA |
| | | C |
| 985 | 5868_Human_quadMut_3A_8A_35T_52T_n1 | GGAGGAGACTGCTGGTGAATATTAACCAAGGTCATCCCAGTTATCGGAGGATCAAACAGGGGCTAAGTCCA |
| | | C |
| 986 | 5869_Human_quadMut_3A_8A_35A_62T_n1 | GGAGGAGACTGCTGGTGAATATTAACCAAGGTCAACCCAGTTATCGGAGGAGCAAACAGGGTCTAAGTCCA |
| | | C |
| 987 | 5880_Human_quadMut_3A_8T_45G_72A_n1 | GGAGGAGTCTGCTGGTGAATATTAACCAAGGTCACCCCAGTTATGGGAGGAGCAAACAGGGGCTAAGTCCA |
| | | A |
| 988 | 5882_Human_quadMut_3A_8A_46A_52A_n1 | GGAGGAGACTGCTGGTGAATATTAACCAAGGTCACCCCAGTTATCAGAGGAACAAACAGGGGCTAAGTCCA |
| | | C |
| 990 | 5883_Human_quadMut_3T_8T_46A_62T_n1 | GGTGGAGTCTGCTGGTGAATATTAACCAAGGTCACCCCAGTTATCAGAGGAGCAAACAGGGTCTAAGTCCA |
| | | C |
| 991 | 5884_Human_quadMut_3T_8C_46A_72A_n1 | GGTGGAGCCTGCTGGTGAATATTAACCAAGGTCACCCCAGTTATCAGAGGAGCAAACAGGGGCTAAGTCCA |
| | | A |
| 992 | 5886_Human_quadMut_3T_8T_48G_62T_n1 | GGTGGAGTCTGCTGGTGAATATTAACCAAGGTCACCCCAGTTATCGGGGGAGCAAACAGGGTCTAAGTCCA |
| | | C |
| 993 | 5889_Human_quadMut_3T_8A_52T_72G_n1 | GGTGGAGACTGCTGGTGAATATTAACCAAGGTCACCCCAGTTATCGGAGGATCAAACAGGGGCTAAGTCCA |
| | | G |
| 994 | 5897_Human_quadMut_3A_14A_37T_48T_n1 | GGAGGAGGCTGCTAGTGAATATTAACCAAGGTCACCTCAGTTATCGGTGGAGCAAACAGGGGCTAAGTCCA |
| | | C |
| 995 | 5899_Human_quadMut_3T_14A_37T_62T_n1 | GGTGGAGGCTGCTAGTGAATATTAACCAAGGTCACCTCAGTTATCGGAGGAGCAAACAGGGTCTAAGTCCA |
| | | C |
| 996 | 5905_Human_quadMut_3A_14T_45T_72A_n1 | GGAGGAGGCTGCTTGTGAATATTAACCAAGGTCACCCCAGTTATTGGAGGAGCAAACAGGGGCTAAGTCCA |
| | | A |
| 997 | 5907_Human_quadMut_3T_14A_46T_52T_n1 | GGTGGAGGCTGCTAGTGAATATTAACCAAGGTCACCCCAGTTATCTGAGGATCAAACAGGGGCTAAGTCCA |
| | | C |
| 998 | 5908_Human_quadMut_3T_14A_46A_62T_n1 | GGTGGAGGCTGCTAGTGAATATTAACCAAGGTCACCCCAGTTATCAGAGGAGCAAACAGGGTCTAAGTCCA |
| | | C |
| 999 | 5911_Human_quadMut_3T_14T_48T_62C_n1 | GGTGGAGGCTGCTTGTGAATATTAACCAAGGTCACCCCAGTTATCGGTGGAGCAAACAGGGCCTAAGTCCA |
| | | C |
| 1000 | 5914_Human_quadMut_3T_14A_52A_72A_n1 | GGTGGAGGCTGCTAGTGAATATTAACCAAGGTCACCCCAGTTATCGGAGGAACAAACAGGGGCTAAGTCCA |
| | | A |
| 1001 | 5916_Human_quadMut_3A_35A_37T_45G_n1 | GGAGGAGGCTGCTGGTGAATATTAACCAAGGTCAACTCAGTTATGGGAGGAGCAAACAGGGGCTAAGTCCA |
| | | C |
| 1002 | 5917_Human_quadMut_3T_35A_37A_46A_n1 | GGTGGAGGCTGCTGGTGAATATTAACCAAGGTCAACACAGTTATCAGAGGAGCAAACAGGGGCTAAGTCCA |
| | | C |
| 1003 | 5919_Human_quadMut_3A_35T_37A_52T_n1 | GGAGGAGGCTGCTGGTGAATATTAACCAAGGTCATCACAGTTATCGGAGGATCAAACAGGGGCTAAGTCCA |
| | | C |
| 1004 | 5921_Human_quadMut_3T_35G_45T_46T_n1 | GGTGGAGGCTGCTGGTGAATATTAACCAAGGTCAGCCCAGTTATTTGAGGAGCAAACAGGGGCTAAGTCCA |
| | | C |
| 1005 | 5926_Human_quadMut_3T_35T_46A_52C_n1 | GGTGGAGGCTGCTGGTGAATATTAACCAAGGTCATCCCAGTTATCAGAGGACCAAACAGGGGCTAAGTCCA |
| | | C |
| 1006 | 5927_Human_quadMut_3T_35A_46T_62T_n1 | GGTGGAGGCTGCTGGTGAATATTAACCAAGGTCAACCCAGTTATCTGAGGAGCAAACAGGGTCTAAGTCCA |
| | | C |
| 1007 | 5929_Human_quadMut_3A_35T_48G_52T_n1 | GGAGGAGGCTGCTGGTGAATATTAACCAAGGTCATCCCAGTTATCGGGGGATCAAACAGGGGCTAAGTCCA |
| | | C |
| 1008 | 5930_Human_quadMut_3T_35T_48T_62C_n1 | GGTGGAGGCTGCTGGTGAATATTAACCAAGGTCATCCCAGTTATCGGTGGAGCAAACAGGGCCTAAGTCCA |
| | | C |
| 1009 | 5932_Human_quadMut_3T_35G_52T_72G_n1 | GGTGGAGGCTGCTGGTGAATATTAACCAAGGTCAGCCCAGTTATCGGAGGATCAAACAGGGGCTAAGTCCA |
| | | G |
| 1010 | 5933_Human_quadMut_3T_35T_62A_72T_n1 | GGTGGAGGCTGCTGGTGAATATTAACCAAGGTCATCCCAGTTATCGGAGGAGCAAACAGGGACTAAGTCCA |
| | | T |
| 1011 | 5934_Human_quadMut_3T_37A_45G_46T_n1 | GGTGGAGGCTGCTGGTGAATATTAACCAAGGTCACCACAGTTATGTGAGGAGCAAACAGGGGCTAAGTCCA |
| | | C |
| 1012 | 5936_Human_quadMut_3T_37A_45G_52A_n1 | GGTGGAGGCTGCTGGTGAATATTAACCAAGGTCACCACAGTTATGGGAGGAACAAACAGGGGCTAAGTCCA |
| | | C |
| 1013 | 5941_Human_quadMut_3A_37T_48T_72T_n1 | GGAGGAGGCTGCTGGTGAATATTAACCAAGGTCACCTCAGTTATCGGTGGAGCAAACAGGGGCTAAGTCCA |
| | | T |
| 1014 | 5944_Human_quadMut_3A_37A_62T_72A_n1 | GGAGGAGGCTGCTGGTGAATATTAACCAAGGTCACCACAGTTATCGGAGGAGCAAACAGGGTCTAAGTCCA |
| | | A |
| 1015 | 5948_Human_quadMut_3A_45A_46A_72A_n1 | GGAGGAGGCTGCTGGTGAATATTAACCAAGGTCACCCCAGTTATAAGAGGAGCAAACAGGGGCTAAGTCCA |
| | | A |
| 1016 | 5950_Human_quadMut_3T_45A_48T_62T_n1 | GGTGGAGGCTGCTGGTGAATATTAACCAAGGTCACCCCAGTTATAGGTGGAGCAAACAGGGTCTAAGTCCA |
| | | C |
| 1017 | 5956_Human_quadMut_3T_46A_48T_72A_n1 | GGTGGAGGCTGCTGGTGAATATTAACCAAGGTCACCCCAGTTATCAGTGGAGCAAACAGGGGCTAAGTCCA |
| | | A |
| 1018 | 5962_Human_quadMut_3T_52T_62T_72T_n1 | GGTGGAGGCTGCTGGTGAATATTAACCAAGGTCACCCCAGTTATCGGAGGATCAAACAGGGTCTAAGTCCA |
| | | T |
| 1019 | 5963_Human_quadMut_8T_14A_35G_37T_n1 | GGGGGAGTCTGCTAGTGAATATTAACCAAGGTCAGCTCAGTTATCGGAGGAGCAAACAGGGGCTAAGTCCA |
| | | C |
| 1020 | 5968_Human_quadMut_8T_14T_35A_62T_n1 | GGGGGAGTCTGCTTGTGAATATTAACCAAGGTCAACCCAGTTATCGGAGGAGCAAACAGGGTCTAAGTCCA |
| | | C |
| 1021 | 5971_Human_quadMut_8T_14A_37A_46A_n1 | GGGGGAGTCTGCTAGTGAATATTAACCAAGGTCACCACAGTTATCAGAGGAGCAAACAGGGGCTAAGTCCA |
| | | C |
| 1022 | 5984_Human_quadMut_8A_14A_48G_52T_n1 | GGGGGAGACTGCTAGTGAATATTAACCAAGGTCACCCCAGTTATCGGGGGATCAAACAGGGGCTAAGTCCA |
| | | C |
| 1023 | 5985_Human_quadMut_8T_14T_48G_62A_n1 | GGGGGAGTCTGCTTGTGAATATTAACCAAGGTCACCCCAGTTATCGGGGGAGCAAACAGGGACTAAGTCCA |
| | | C |
| 1024 | 5990_Human_quadMut_8A_35T_37T_45G_n1 | GGGGGAGACTGCTGGTGAATATTAACCAAGGTCATCTCAGTTATGGGAGGAGCAAACAGGGGCTAAGTCCA |
| | | C |
| 1025 | 5991_Human_quadMut_8A_35G_37T_46T_n1 | GGGGGAGACTGCTGGTGAATATTAACCAAGGTCAGCTCAGTTATCTGAGGAGCAAACAGGGGCTAAGTCCA |
| | | C |
| 1026 | 5993_Human_quadMut_8C_35A_37T_52T_n1 | GGGGGAGCCTGCTGGTGAATATTAACCAAGGTCAACTCAGTTATCGGAGGATCAAACAGGGGCTAAGTCCA |
| | | C |
| 1027 | 5995_Human_quadMut_8A_35G_45A_46A_n1 | GGGGGAGACTGCTGGTGAATATTAACCAAGGTCAGCCCAGTTATAAGAGGAGCAAACAGGGGCTAAGTCCA |
| | | C |
| 1028 | 5996_Human_quadMut_8C_35A_45T_48T_n1 | GGGGGAGCCTGCTGGTGAATATTAACCAAGGTCAACCCAGTTATTGGTGGAGCAAACAGGGGCTAAGTCCA |
| | | C |

TABLE 11
Single or adjacent di-nucleotide substitution variants of Chinese
Tree Shrew SERPINA1 enhancer with higher luciferase expression
than original sequence SEQ ID NO: 122

| SEQ | | |
|---|---|---|
| ID | Chinese Tree Shrew | |
| NO: | SerpEnh variant | Sequence |
| 1029 | 2290_ChineseTreeShrewMod_ | GAAGGCTGTTGGTGAATATTAACCAAGGTC |
| | monoMut_G2A_n1 | ACCTCAGTTATCGGAGGAGCAAACAAGGGC |
| | | TAAGTCCAC |
| 1030 | 2293_ChineseTreeShrewMod_ | GGCGGCTGTTGGTGAATATTAACCAAGGTC |
| | monoMut_A3C_n1 | ACCTCAGTTATCGGAGGAGCAAACAAGGGC |
| | | TAAGTCCAC |
| 1031 | 2295_ChineseTreeShrewMod_ | GGTGGCTGTTGGTGAATATTAACCAAGGTC |
| | monoMut_A3T_n1 | ACCTCAGTTATCGGAGGAGCAAACAAGGGC |
| | | TAAGTCCAC |
| 1032 | 2296_ChineseTreeShrewMod_ | GGAAGCTGTTGGTGAATATTAACCAAGGTC |
| | monoMut_G4A_n1 | ACCTCAGTTATCGGAGGAGCAAACAAGGGC |
| | | TAAGTCCAC |
| 1033 | 2298_ChineseTreeShrewMod_ | GGATGCTGTTGGTGAATATTAACCAAGGTC |
| | monoMut_G4T_n1 | ACCTCAGTTATCGGAGGAGCAAACAAGGGC |
| | | TAAGTCCAC |
| 1034 | 2302_ChineseTreeShrewMod_ | GGAGGATGTTGGTGAATATTAACCAAGGTC |
| | monoMut_C6A_n1 | ACCTCAGTTATCGGAGGAGCAAACAAGGGC |
| | | TAAGTCCAC |
| 1035 | 2305_ChineseTreeShrewMod_ | GGAGGCAGTTGGTGAATATTAACCAAGGTC |
| | monoMut_T7A_n1 | ACCTCAGTTATCGGAGGAGCAAACAAGGGC |
| | | TAAGTCCAC |
| 1036 | 2309_ChineseTreeShrewMod_ | GGAGGCTCTTGGTGAATATTAACCAAGGTC |
| | monoMut_G8C_n1 | ACCTCAGTTATCGGAGGAGCAAACAAGGGC |
| | | TAAGTCCAC |
| 1037 | 2310_ChineseTreeShrewMod_ | GGAGGCTTTTGGTGAATATTAACCAAGGTC |
| | monoMut_G8T_n1 | ACCTCAGTTATCGGAGGAGCAAACAAGGGC |
| | | TAAGTCCAC |
| 1038 | 2314_ChineseTreeShrewMod_ | GGAGGCTGTAGGTGAATATTAACCAAGGTC |
| | monoMut_T10A_n1 | ACCTCAGTTATCGGAGGAGCAAACAAGGGC |
| | | TAAGTCCAC |
| 1039 | 2316_ChineseTreeShrewMod_ | GGAGGCTGTGGGTGAATATTAACCAAGGTC |
| | monoMut_T10G_n1 | ACCTCAGTTATCGGAGGAGCAAACAAGGGC |
| | | TAAGTCCAC |
| 1040 | 2317_ChineseTreeShrewMod_ | GGAGGCTGTTAGTGAATATTAACCAAGGTC |
| | monoMut_G11A_n1 | ACCTCAGTTATCGGAGGAGCAAACAAGGGC |
| | | TAAGTCCAC |
| 1041 | 2319_ChineseTreeShrewMod_ | GGAGGCTGTTTGTGAATATTAACCAAGGTC |
| | monoMut_G11T_n1 | ACCTCAGTTATCGGAGGAGCAAACAAGGGC |
| | | TAAGTCCAC |
| 1042 | 2321_ChineseTreeShrewMod_ | GGAGGCTGTTGCTGAATATTAACCAAGGTC |
| | monoMut_G12C_n1 | ACCTCAGTTATCGGAGGAGCAAACAAGGGC |
| | | TAAGTCCAC |
| 1043 | 2325_ChineseTreeShrewMod_ | GGAGGCTGTTGGGGAATATTAACCAAGGTC |
| | monoMut_T13G_n1 | ACCTCAGTTATCGGAGGAGCAAACAAGGGC |
| | | TAAGTCCAC |
| 1044 | 2326_ChineseTreeShrewMod_ | GGAGGCTGTTGGTAAATATTAACCAAGGTC |
| | monoMut_G14A_n1 | ACCTCAGTTATCGGAGGAGCAAACAAGGGC |
| | | TAAGTCCAC |
| 1045 | 2327_ChineseTreeShrewMod_ | GGAGGCTGTTGGTCAATATTAACCAAGGTC |
| | monoMut_G14C_n1 | ACCTCAGTTATCGGAGGAGCAAACAAGGGC |
| | | TAAGTCCAC |
| 1046 | 2328_ChineseTreeShrewMod_ | GGAGGCTGTTGGTTAATATTAACCAAGGTC |
| | monoMut_G14T_n1 | ACCTCAGTTATCGGAGGAGCAAACAAGGGC |
| | | TAAGTCCAC |
| 1047 | 2331_ChineseTreeShrewMod_ | GGAGGCTGTTGGTGTATATTAACCAAGGTC |
| | monoMut_A15T_n1 | ACCTCAGTTATCGGAGGAGCAAACAAGGGC |
| | | TAAGTCCAC |
| 1048 | 2332_ChineseTreeShrewMod_ | GGAGGCTGTTGGTGACTATTAACCAAGGTC |
| | monoMut_A16C_n1 | ACCTCAGTTATCGGAGGAGCAAACAAGGGC |
| | | TAAGTCCAC |
| 1049 | 2334_ChineseTreeShrewMod_ | GGAGGCTGTTGGTGATTATTAACCAAGGTC |
| | monoMut_A16T_n1 | ACCTCAGTTATCGGAGGAGCAAACAAGGGC |
| | | TAAGTCCAC |
| 1050 | 2336_ChineseTreeShrewMod_ | GGAGGCTGTTGGTGAACATTAACCAAGGTC |
| | monoMut_T17C_n1 | ACCTCAGTTATCGGAGGAGCAAACAAGGGC |
| | | TAAGTCCAC |
| 1051 | 2337_ChineseTreeShrewMod_ | GGAGGCTGTTGGTGAAGATTAACCAAGGTC |
| | monoMut_T17G_n1 | ACCTCAGTTATCGGAGGAGCAAACAAGGGC |
| | | TAAGTCCAC |
| 1052 | 2344_ChineseTreeShrewMod_ | GGAGGCTGTTGGTGAATATAAACCAAGGTC |
| | monoMut_T20A_n1 | ACCTCAGTTATCGGAGGAGCAAACAAGGGC |
| | | TAAGTCCAC |
| 1053 | 2345_ChineseTreeShrewMod_ | GGAGGCTGTTGGTGAATATCAACCAAGGTC |
| | monoMut_T20C_n1 | ACCTCAGTTATCGGAGGAGCAAACAAGGGC |
| | | TAAGTCCAC |
| 1054 | 2346_ChineseTreeShrewMod_ | GGAGGCTGTTGGTGAATATGAACCAAGGTC |
| | monoMut_T20G_n1 | ACCTCAGTTATCGGAGGAGCAAACAAGGGC |
| | | TAAGTCCAC |
| 1055 | 2351_ChineseTreeShrewMod_ | GGAGGCTGTTGGTGAATATTAGCCAAGGTC |
| | monoMut_A22G_n1 | ACCTCAGTTATCGGAGGAGCAAACAAGGGC |
| | | TAAGTCCAC |
| 1056 | 2352_ChineseTreeShrewMod_ | GGAGGCTGTTGGTGAATATTATCCAAGGTC |
| | monoMut_A22T_n1 | ACCTCAGTTATCGGAGGAGCAAACAAGGGC |
| | | TAAGTCCAC |
| 1057 | 2360_ChineseTreeShrewMod_ | GGAGGCTGTTGGTGAATATTAACCGAGGTC |
| | monoMut_A25G_n1 | ACCTCAGTTATCGGAGGAGCAAACAAGGGC |
| | | TAAGTCCAC |
| 1058 | 2363_ChineseTreeShrewMod_ | GGAGGCTGTTGGTGAATATTAACCAGGGTC |
| | monoMut_A26G_n1 | ACCTCAGTTATCGGAGGAGCAAACAAGGGC |
| | | TAAGTCCAC |
| 1059 | 2365_ChineseTreeShrewMod_ | GGAGGCTGTTGGTGAATATTAACCAAAGTC |
| | monoMut_G27A_n1 | ACCTCAGTTATCGGAGGAGCAAACAAGGGC |
| | | TAAGTCCAC |
| 1060 | 2369_ChineseTreeShrewMod_ | GGAGGCTGTTGGTGAATATTAACCAAGCTC |
| | monoMut_G28C_n1 | ACCTCAGTTATCGGAGGAGCAAACAAGGGC |
| | | TAAGTCCAC |
| 1061 | 2372_ChineseTreeShrewMod_ | GGAGGCTGTTGGTGAATATTAACCAAGGCC |
| | monoMut_T29C_n1 | ACCTCAGTTATCGGAGGAGCAAACAAGGGC |
| | | TAAGTCCAC |
| 1062 | 2373_ChineseTreeShrewMod_ | GGAGGCTGTTGGTGAATATTAACCAAGGGC |
| | monoMut_T29G_n1 | ACCTCAGTTATCGGAGGAGCAAACAAGGGC |
| | | TAAGTCCAC |
| 1063 | 2375_ChineseTreeShrewMod_ | GGAGGCTGTTGGTGAATATTAACCAAGGTG |
| | monoMut_C30G_n1 | ACCTCAGTTATCGGAGGAGCAAACAAGGGC |
| | | TAAGTCCAC |
| 1064 | 2378_ChineseTreeShrewMod_ | GGAGGCTGTTGGTGAATATTAACCAAGGTC |
| | monoMut_A31G_n1 | GCCTCAGTTATCGGAGGAGCAAACAAGGGC |
| | | TAAGTCCAC |
| 1065 | 2379_ChineseTreeShrewMod_ | GGAGGCTGTTGGTGAATATTAACCAAGGTC |
| | monoMut_A31T_n1 | TCCTCAGTTATCGGAGGAGCAAACAAGGGC |
| | | TAAGTCCAC |
| 1066 | 2380_ChineseTreeShrewMod_ | GGAGGCTGTTGGTGAATATTAACCAAGGTC |
| | monoMut_C32A_n1 | AACTCAGTTATCGGAGGAGCAAACAAGGGC |
| | | TAAGTCCAC |
| 1067 | 2381_ChineseTreeShrewMod_ | GGAGGCTGTTGGTGAATATTAACCAAGGTC |
| | monoMut_C32G_n1 | AGCTCAGTTATCGGAGGAGCAAACAAGGGC |
| | | TAAGTCCAC |
| 1068 | 2382_ChineseTreeShrewMod_ | GGAGGCTGTTGGTGAATATTAACCAAGGTC |
| | monoMut_C32T_n1 | ATCTCAGTTATCGGAGGAGCAAACAAGGGC |
| | | TAAGTCCAC |
| 1069 | 2383_ChineseTreeShrewMod_ | GGAGGCTGTTGGTGAATATTAACCAAGGTC |
| | monoMut_C33A_n1 | ACATCAGTTATCGGAGGAGCAAACAAGGGC |
| | | TAAGTCCAC |
| 1070 | 2385_ChineseTreeShrewMod_ | GGAGGCTGTTGGTGAATATTAACCAAGGTC |
| | monoMut_C33T_n1 | ACTTCAGTTATCGGAGGAGCAAACAAGGGC |
| | | TAAGTCCAC |
| 1071 | 2389_ChineseTreeShrewMod_ | GGAGGCTGTTGGTGAATATTAACCAAGGTC |
| | monoMut_C35A_n1 | ACCTAAGTTATCGGAGGAGCAAACAAGGGC |
| | | TAAGTCCAC |
| 1072 | 2390_ChineseTreeShrewMod_ | GGAGGCTGTTGGTGAATATTAACCAAGGTC |
| | monoMut_C35G_n1 | ACCTGAGTTATCGGAGGAGCAAACAAGGGC |
| | | TAAGTCCAC |
| 1073 | 2392_ChineseTreeShrewMod_ | GGAGGCTGTTGGTGAATATTAACCAAGGTC |
| | monoMut_A36C_n1 | ACCTCCGTTATCGGAGGAGCAAACAAGGGC |
| | | TAAGTCCAC |
| 1072 | 2393_ChineseTreeShrewMod_ | GGAGGCTGTTGGTGAATATTAACCAAGGTC |
| | monoMut_A36G_n1 | ACCTCGGTTATCGGAGGAGCAAACAAGGGC |
| | | TAAGTCCAC |
| 1075 | 2394_ChineseTreeShrewMod_ | GGAGGCTGTTGGTGAATATTAACCAAGGTC |
| | monoMut_A36T_n1 | ACCTCTGTTATCGGAGGAGCAAACAAGGGC |
| | | TAAGTCCAC |
| 1076 | 2396_ChineseTreeShrewMod_ | GGAGGCTGTTGGTGAATATTAACCAAGGTC |
| | monoMut_G37C_n1 | ACCTCACTTATCGGAGGAGCAAACAAGGGC |
| | | TAAGTCCAC |
| 1077 | 2398_ChineseTreeShrewMod_ | GGAGGCTGTTGGTGAATATTAACCAAGGTC |
| | monoMut_T38A_n1 | ACCTCAGATATCGGAGGAGCAAACAAGGGC |
| | | TAAGTCCAC |
| 1078 | 2399_ChineseTreeShrewMod_ | GGAGGCTGTTGGTGAATATTAACCAAGGTC |
| | monoMut_T38C_n1 | ACCTCAGCTATCGGAGGAGCAAACAAGGGC |
| | | TAAGTCCAC |
| 1079 | 2400_ChineseTreeShrewMod_ | GGAGGCTGTTGGTGAATATTAACCAAGGTC |
| | monoMut_T38G_n1 | ACCTCAGGTATCGGAGGAGCAAACAAGGGC |
| | | TAAGTCCAC |
| 1080 | 2402_ChineseTreeShrewMod_ | GGAGGCTGTTGGTGAATATTAACCAAGGTC |
| | monoMut_T39C_n1 | ACCTCAGTCATCGGAGGAGCAAACAAGGGC |
| | | TAAGTCCAC |
| 1081 | 2403_ChineseTreeShrewMod_ | GGAGGCTGTTGGTGAATATTAACCAAGGTC |
| | monoMut_T39G_n1 | ACCTCAGTGATCGGAGGAGCAAACAAGGGC |
| | | TAAGTCCAC |
| 1082 | 2405_ChineseTreeShrewMod_ | GGAGGCTGTTGGTGAATATTAACCAAGGTC |
| | monoMut_A40G_n1 | ACCTCAGTTGTCGGAGGAGCAAACAAGGGC |
| | | TAAGTCCAC |
| 1083 | 2407_ChineseTreeShrewMod_ | GGAGGCTGTTGGTGAATATTAACCAAGGTC |
| | monoMut_T41A_n1 | ACCTCAGTTAACGGAGGAGCAAACAAGGGC |
| | | TAAGTCCAC |
| 1084 | 2409_ChineseTreeShrewMod_ | GGAGGCTGTTGGTGAATATTAACCAAGGTC |
| | monoMut_T41G_n1 | ACCTCAGTTAGCGGAGGAGCAAACAAGGGC |
| | | TAAGTCCAC |
| 1085 | 2411_ChineseTreeShrewMod_ | GGAGGCTGTTGGTGAATATTAACCAAGGTC |
| | monoMut_C42G_n1 | ACCTCAGTTATGGGAGGAGCAAACAAGGGC |
| | | TAAGTCCAC |
| 1086 | 2413_ChineseTreeShrewMod_ | GGAGGCTGTTGGTGAATATTAACCAAGGTC |
| | monoMut_G43A_n1 | ACCTCAGTTATCAGAGGAGCAAACAAGGGC |
| | | TAAGTCCAC |
| 1087 | 2414_ChineseTreeShrewMod_ | GGAGGCTGTTGGTGAATATTAACCAAGGTC |
| | monoMut_G43C_n1 | ACCTCAGTTATCCGAGGAGCAAACAAGGGC |
| | | TAAGTCCAC |
| 1088 | 2416_ChineseTreeShrewMod_ | GGAGGCTGTTGGTGAATATTAACCAAGGTC |
| | monoMut_G44A_n1 | ACCTCAGTTATCGAAGGAGCAAACAAGGGC |
| | | TAAGTCCAC |
| 1089 | 2417_ChineseTreeShrewMod_ | GGAGGCTGTTGGTGAATATTAACCAAGGTC |
| | monoMut_G44C_n1 | ACCTCAGTTATCGCAGGAGCAAACAAGGGC |
| | | TAAGTCCAC |
| 1090 | 2419_ChineseTreeShrewMod_ | GGAGGCTGTTGGTGAATATTAACCAAGGTC |
| | monoMut_A45C_n1 | ACCTCAGTTATCGGCGGAGCAAACAAGGGC |
| | | TAAGTCCAC |
| 1091 | 2422_ChineseTreeShrewMod_ | GGAGGCTGTTGGTGAATATTAACCAAGGTC |
| | monoMut_G46A_n1 | ACCTCAGTTATCGGAAGAGCAAACAAGGGC |
| | | TAAGTCCAC |
| 1092 | 2423_ChineseTreeShrewMod_ | GGAGGCTGTTGGTGAATATTAACCAAGGTC |
| | monoMut_G46C_n1 | ACCTCAGTTATCGGACGAGCAAACAAGGGC |
| | | TAAGTCCAC |
| 1093 | 2424_ChineseTreeShrewMod_ | GGAGGCTGTTGGTGAATATTAACCAAGGTC |
| | monoMut_G46T_n1 | ACCTCAGTTATCGGATGAGCAAACAAGGGC |
| | | TAAGTCCAC |
| 1094 | 2425_ChineseTreeShrewMod_ | GGAGGCTGTTGGTGAATATTAACCAAGGTC |
| | monoMut_G47A_n1 | ACCTCAGTTATCGGAGAAGCAAACAAGGGC |
| | | TAAGTCCAC |
| 1095 | 2426_ChineseTreeShrewMod_ | GGAGGCTGTTGGTGAATATTAACCAAGGTC |
| | monoMut_G47C_n1 | ACCTCAGTTATCGGAGCAGCAAACAAGGGC |
| | | TAAGTCCAC |
| 1096 | 2428_ChineseTreeShrewMod_ | GGAGGCTGTTGGTGAATATTAACCAAGGTC |
| | monoMut_A48C_n1 | ACCTCAGTTATCGGAGGCGCAAACAAGGGC |
| | | TAAGTCCAC |
| 1097 | 2429_ChineseTreeShrewMod_ | GGAGGCTGTTGGTGAATATTAACCAAGGTC |
| | monoMut_A48G_n1 | ACCTCAGTTATCGGAGGGGCAAACAAGGGC |
| | | TAAGTCCAC |
| 1098 | 2430_ChineseTreeShrewMod_ | GGAGGCTGTTGGTGAATATTAACCAAGGTC |
| | monoMut_A48T_n1 | ACCTCAGTTATCGGAGGTGCAAACAAGGGC |
| | | TAAGTCCAC |
| 1099 | 2431_ChineseTreeShrewMod_ | GGAGGCTGTTGGTGAATATTAACCAAGGTC |
| | monoMut_G49A_n1 | ACCTCAGTTATCGGAGGAACAAACAAGGGC |
| | | TAAGTCCAC |
| 1100 | 2433_ChineseTreeShrewMod_ | GGAGGCTGTTGGTGAATATTAACCAAGGTC |
| | monoMut_G49T_n1 | ACCTCAGTTATCGGAGGATCAAACAAGGGC |
| | | TAAGTCCAC |
| 1101 | 2436_ChineseTreeShrewMod_ | GGAGGCTGTTGGTGAATATTAACCAAGGTC |
| | monoMut_C50T_n1 | ACCTCAGTTATCGGAGGAGTAAACAAGGGC |
| | | TAAGTCCAC |
| 1102 | 2437_ChineseTreeShrewMod_ | GGAGGCTGTTGGTGAATATTAACCAAGGTC |
| | monoMut_A51C_n1 | ACCTCAGTTATCGGAGGAGCCAACAAGGGC |
| | | TAAGTCCAC |
| 1103 | 2448_ChineseTreeShrewMod_ | GGAGGCTGTTGGTGAATATTAACCAAGGTC |
| | monoMut_C54T_n1 | ACCTCAGTTATCGGAGGAGCAAATAAGGGC |
| | | TAAGTCCAC |
| 1104 | 2450_ChineseTreeShrewMod_ | GGAGGCTGTTGGTGAATATTAACCAAGGTC |
| | monoMut_A55G_n1 | ACCTCAGTTATCGGAGGAGCAAACGAGGGC |
| | | TAAGTCCAC |
| 1105 | 2453_ChineseTreeShrewMod_ | GGAGGCTGTTGGTGAATATTAACCAAGGTC |
| | monoMut_A56G_n1 | ACCTCAGTTATCGGAGGAGCAAACAGGGGC |
| | | TAAGTCCAC |
| 1106 | 2454_ChineseTreeShrewMod_ | GGAGGCTGTTGGTGAATATTAACCAAGGTC |
| | monoMut_A56T_n1 | ACCTCAGTTATCGGAGGAGCAAACATGGGC |
| | | TAAGTCCAC |
| 1107 | 2457_ChineseTreeShrewMod_ | GGAGGCTGTTGGTGAATATTAACCAAGGTC |
| | monoMut_G57T_n1 | ACCTCAGTTATCGGAGGAGCAAACAATGGC |
| | | TAAGTCCAC |
| 1108 | 2459_ChineseTreeShrewMod_ | GGAGGCTGTTGGTGAATATTAACCAAGGTC |
| | monoMut_G58C_n1 | ACCTCAGTTATCGGAGGAGCAAACAAGCGC |
| | | TAAGTCCAC |
| 1109 | 2460_ChineseTreeShrewMod_ | GGAGGCTGTTGGTGAATATTAACCAAGGTC |
| | monoMut_G58T_n1 | ACCTCAGTTATCGGAGGAGCAAACAAGTGC |
| | | TAAGTCCAC |
| 1110 | 2461_ChineseTreeShrewMod_ | GGAGGCTGTTGGTGAATATTAACCAAGGTC |
| | monoMut_G59A_n1 | ACCTCAGTTATCGGAGGAGCAAACAAGGAC |
| | | TAAGTCCAC |
| 1111 | 2462_ChineseTreeShrewMod_ | GGAGGCTGTTGGTGAATATTAACCAAGGTC |
| | monoMut_G59C_n1 | ACCTCAGTTATCGGAGGAGCAAACAAGGCC |
| | | TAAGTCCAC |
| 1112 | 2463_ChineseTreeShrewMod_ | GGAGGCTGTTGGTGAATATTAACCAAGGTC |
| | monoMut_G59T_n1 | ACCTCAGTTATCGGAGGAGCAAACAAGGTC |
| | | TAAGTCCAC |
| 1113 | 2467_ChineseTreeShrewMod_ | GGAGGCTGTTGGTGAATATTAACCAAGGTC |
| | monoMut_T61A_n1 | ACCTCAGTTATCGGAGGAGCAAACAAGGGC |
| | | AAAGTCCAC |
| 1114 | 2469_ChineseTreeShrewMod_ | GGAGGCTGTTGGTGAATATTAACCAAGGTC |
| | monoMut_T61G_n1 | ACCTCAGTTATCGGAGGAGCAAACAAGGGC |
| | | GAAGTCCAC |
| 1115 | 2482_ChineseTreeShrewMod_ | GGAGGCTGTTGGTGAATATTAACCAAGGTC |
| | monoMut_C66A_n1 | ACCTCAGTTATCGGAGGAGCAAACAAGGGC |
| | | TAAGTACAC |
| 1116 | 2484_ChineseTreeShrewMod_ | GGAGGCTGTTGGTGAATATTAACCAAGGTC |
| | monoMut_C66T_n1 | ACCTCAGTTATCGGAGGAGCAAACAAGGGC |
| | | TAAGTTCAC |
| 1117 | 2491_ChineseTreeShrewMod_ | GGAGGCTGTTGGTGAATATTAACCAAGGTC |
| | monoMut_C69A_n1 | ACCTCAGTTATCGGAGGAGCAAACAAGGGC |
| | | TAAGTCCAA |
| 1118 | 2498_ChineseTreeShrewMod_ | CCAGGCTGTTGGTGAATATTAACCAAGGTC |
| | diMut_GG1CC_n1 | ACCTCAGTTATCGGAGGAGCAAACAAGGGC |
| | | TAAGTCCAC |
| 1119 | 2499_ChineseTreeShrewMod_ | CTAGGCTGTTGGTGAATATTAACCAAGGTC |
| | diMut_GG1CT_n1 | ACCTCAGTTATCGGAGGAGCAAACAAGGGC |
| | | TAAGTCCAC |
| 1110 | 2503_ChineseTreeShrewMod_ | GACGGCTGTTGGTGAATATTAACCAAGGTC |
| | diMut_GA2AC_n1 | ACCTCAGTTATCGGAGGAGCAAACAAGGGC |
| | | TAAGTCCAC |
| 1121 | 2504_ChineseTreeShrewMod_ | GAGGGCTGTTGGTGAATATTAACCAAGGTC |
| | diMut_GA2AG_n1 | ACCTCAGTTATCGGAGGAGCAAACAAGGGC |
| | | TAAGTCCAC |
| 1122 | 2505_ChineseTreeShrewMod_ | GATGGCTGTTGGTGAATATTAACCAAGGTC |
| | diMut_GA2AT_n1 | ACCTCAGTTATCGGAGGAGCAAACAAGGGC |
| | | TAAGTCCAC |
| 1123 | 2507_ChineseTreeShrewMod_ | GCGGGCTGTTGGTGAATATTAACCAAGGTC |
| | diMut_GA2CG_n1 | ACCTCAGTTATCGGAGGAGCAAACAAGGGC |
| | | TAAGTCCAC |
| 1124 | 2508_ChineseTreeShrewMod_ | GCTGGCTGTTGGTGAATATTAACCAAGGTC |
| | diMut_GA2CT_n1 | ACCTCAGTTATCGGAGGAGCAAACAAGGGC |
| | | TAAGTCCAC |
| 1125 | 2510_ChineseTreeShrewMod_ | GTGGGCTGTTGGTGAATATTAACCAAGGTC |
| | diMut_GA2TG_n1 | ACCTCAGTTATCGGAGGAGCAAACAAGGGC |
| | | TAAGTCCAC |
| 1126 | 2511_ChineseTreeShrewMod_ | GTTGGCTGTTGGTGAATATTAACCAAGGTC |
| | diMut_GA2TT_n1 | ACCTCAGTTATCGGAGGAGCAAACAAGGGC |
| | | TAAGTCCAC |
| 1127 | 2512_ChineseTreeShrewMod_ | GGCAGCTGTTGGTGAATATTAACCAAGGTC |
| | diMut_AG3CA_n1 | ACCTCAGTTATCGGAGGAGCAAACAAGGGC |
| | | TAAGTCCAC |
| 1128 | 2514_ChineseTreeShrewMod_ | GGCTGCTGTTGGTGAATATTAACCAAGGTC |
| | diMut_AG3CT_n1 | ACCTCAGTTATCGGAGGAGCAAACAAGGGC |
| | | TAAGTCCAC |
| 1129 | 2516_ChineseTreeShrewMod_ | GGGCGCTGTTGGTGAATATTAACCAAGGTC |
| | diMut_AG3GC_n1 | ACCTCAGTTATCGGAGGAGCAAACAAGGGC |
| | | TAAGTCCAC |
| 1130 | 2517_ChineseTreeShrewMod_ | GGGTGCTGTTGGTGAATATTAACCAAGGTC |
| | diMut_AG3GT_n1 | ACCTCAGTTATCGGAGGAGCAAACAAGGGC |
| | | TAAGTCCAC |
| 1131 | 2519_ChineseTreeShrewMod_ | GGTCGCTGTTGGTGAATATTAACCAAGGTC |
| | diMut_AG3TC_n1 | ACCTCAGTTATCGGAGGAGCAAACAAGGGC |
| | | TAAGTCCAC |
| 1132 | 2520_ChineseTreeShrewMod_ | GGTTGCTGTTGGTGAATATTAACCAAGGTC |
| | diMut_AG3TT_n1 | ACCTCAGTTATCGGAGGAGCAAACAAGGGC |
| | | TAAGTCCAC |
| 1133 | 2521_ChineseTreeShrewMod_ | GGAAACTGTTGGTGAATATTAACCAAGGTC |
| | diMut_GG4AA_n1 | ACCTCAGTTATCGGAGGAGCAAACAAGGGC |
| | | TAAGTCCAC |
| 1134 | 2523_ChineseTreeShrewMod_ | GGAATCTGTTGGTGAATATTAACCAAGGTC |
| | diMut_GG4AT_n1 | ACCTCAGTTATCGGAGGAGCAAACAAGGGC |
| | | TAAGTCCAC |
| 1135 | 2524_ChineseTreeShrewMod_ | GGACACTGTTGGTGAATATTAACCAAGGTC |
| | diMut_GG4CA_n1 | ACCTCAGTTATCGGAGGAGCAAACAAGGGC |
| | | TAAGTCCAC |
| 1136 | 2525_ChineseTreeShrewMod_ | GGACCCTGTTGGTGAATATTAACCAAGGTC |
| | diMut_GG4CC_n1 | ACCTCAGTTATCGGAGGAGCAAACAAGGGC |
| | | TAAGTCCAC |
| 1137 | 2526_ChineseTreeShrewMod_ | GGACTCTGTTGGTGAATATTAACCAAGGTC |
| | diMut_GG4CT_n1 | ACCTCAGTTATCGGAGGAGCAAACAAGGGC |
| | | TAAGTCCAC |
| 1138 | 2527_ChineseTreeShrewMod_ | GGATACTGTTGGTGAATATTAACCAAGGTC |
| | diMut_GG4TA_n1 | ACCTCAGTTATCGGAGGAGCAAACAAGGGC |
| | | TAAGTCCAC |
| 1139 | 2529_ChineseTreeShrewMod_ | GGATTCTGTTGGTGAATATTAACCAAGGTC |
| | diMut_GG4TT_n1 | ACCTCAGTTATCGGAGGAGCAAACAAGGGC |
| | | TAAGTCCAC |
| 1140 | 2530_ChineseTreeShrewMod_ | GGAGAATGTTGGTGAATATTAACCAAGGTC |
| | diMut_GC5AA_n1 | ACCTCAGTTATCGGAGGAGCAAACAAGGGC |
| | | TAAGTCCAC |
| 1141 | 2531_ChineseTreeShrewMod_ | GGAGAGTGTTGGTGAATATTAACCAAGGTC |
| | diMut_GC5AG_n1 | ACCTCAGTTATCGGAGGAGCAAACAAGGGC |
| | | TAAGTCCAC |
| 1142 | 2533_ChineseTreeShrewMod_ | GGAGCATGTTGGTGAATATTAACCAAGGTC |
| | diMut_GC5CA_n1 | ACCTCAGTTATCGGAGGAGCAAACAAGGGC |
| | | TAAGTCCAC |
| 1143 | 2534_ChineseTreeShrewMod_ | GGAGCGTGTTGGTGAATATTAACCAAGGTC |
| | diMut_GC5CG_n1 | ACCTCAGTTATCGGAGGAGCAAACAAGGGC |
| | | TAAGTCCAC |
| 1144 | 2536_ChineseTreeShrewMod_ | GGAGTATGTTGGTGAATATTAACCAAGGTC |
| | diMut_GC5TA_n1 | ACCTCAGTTATCGGAGGAGCAAACAAGGGC |
| | | TAAGTCCAC |
| 1145 | 2538_ChineseTreeShrewMod_ | GGAGTTTGTTGGTGAATATTAACCAAGGTC |
| | diMut_GC5TT_n1 | ACCTCAGTTATCGGAGGAGCAAACAAGGGC |
| | | TAAGTCCAC |
| 1146 | 2540_ChineseTreeShrewMod_ | GGAGGACGTTGGTGAATATTAACCAAGGTC |
| | diMut_CT6AC_n1 | ACCTCAGTTATCGGAGGAGCAAACAAGGGC |
| | | TAAGTCCAC |
| 1147 | 2541_ChineseTreeShrewMod_ | GGAGGAGGTTGGTGAATATTAACCAAGGTC |
| | diMut_CT6AG_n1 | ACCTCAGTTATCGGAGGAGCAAACAAGGGC |
| | | TAAGTCCAC |
| 1148 | 2544_ChineseTreeShrewMod_ | GGAGGGGGTTGGTGAATATTAACCAAGGTC |
| | diMut_CT6GG_n1 | ACCTCAGTTATCGGAGGAGCAAACAAGGGC |
| | | TAAGTCCAC |
| 1149 | 2547_ChineseTreeShrewMod_ | GGAGGTGGTTGGTGAATATTAACCAAGGTC |
| | diMut_CT6TG_n1 | ACCTCAGTTATCGGAGGAGCAAACAAGGGC |
| | | TAAGTCCAC |
| 1150 | 2548_ChineseTreeShrewMod_ | GGAGGCAATTGGTGAATATTAACCAAGGTC |
| | diMut_TG7AA_n1 | ACCTCAGTTATCGGAGGAGCAAACAAGGGC |
| | | TAAGTCCAC |
| 1151 | 2550_ChineseTreeShrewMod_ | GGAGGCATTTGGTGAATATTAACCAAGGTC |
| | diMut_TG7AT_n1 | ACCTCAGTTATCGGAGGAGCAAACAAGGGC |
| | | TAAGTCCAC |
| 1152 | 2552_ChineseTreeShrewMod_ | GGAGGCCCTTGGTGAATATTAACCAAGGTC |
| | diMut_TG7CC_n1 | ACCTCAGTTATCGGAGGAGCAAACAAGGGC |
| | | TAAGTCCAC |
| 1153 | 2553_ChineseTreeShrewMod_ | GGAGGCCTTTGGTGAATATTAACCAAGGTC |
| | diMut_TG7CT_n1 | ACCTCAGTTATCGGAGGAGCAAACAAGGGC |
| | | TAAGTCCAC |
| 1154 | 2554_ChineseTreeShrewMod_ | GGAGGCGATTGGTGAATATTAACCAAGGTC |
| | diMut_TG7GA_n1 | ACCTCAGTTATCGGAGGAGCAAACAAGGGC |
| | | TAAGTCCAC |
| 1155 | 2555_ChineseTreeShrewMod_ | GGAGGCGCTTGGTGAATATTAACCAAGGTC |
| | diMut_TG7GC_n1 | ACCTCAGTTATCGGAGGAGCAAACAAGGGC |
| | | TAAGTCCAC |
| 1156 | 2556_ChineseTreeShrewMod_ | GGAGGCGTTTGGTGAATATTAACCAAGGTC |
| | diMut_TG7GT_n1 | ACCTCAGTTATCGGAGGAGCAAACAAGGGC |
| | | TAAGTCCAC |
| 1157 | 2557_ChineseTreeShrewMod_ | GGAGGCTAATGGTGAATATTAACCAAGGTC |
| | diMut_GT8AA_n1 | ACCTCAGTTATCGGAGGAGCAAACAAGGGC |
| | | TAAGTCCAC |
| 1158 | 2558_ChineseTreeShrewMod_ | GGAGGCTACTGGTGAATATTAACCAAGGTC |
| | diMut_GT8AC_n1 | ACCTCAGTTATCGGAGGAGCAAACAAGGGC |
| | | TAAGTCCAC |
| 1159 | 2559_ChineseTreeShrewMod_ | GGAGGCTAGTGGTGAATATTAACCAAGGTC |
| | diMut_GT8AG_n1 | ACCTCAGTTATCGGAGGAGCAAACAAGGGC |
| | | TAAGTCCAC |
| 1160 | 2560_ChineseTreeShrewMod_ | GGAGGCTCATGGTGAATATTAACCAAGGTC |
| | diMut_GT8CA_n1 | ACCTCAGTTATCGGAGGAGCAAACAAGGGC |
| | | TAAGTCCAC |
| 1161 | 2561_ChineseTreeShrewMod_ | GGAGGCTCCTGGTGAATATTAACCAAGGTC |
| | diMut_GT8CC_n1 | ACCTCAGTTATCGGAGGAGCAAACAAGGGC |
| | | TAAGTCCAC |
| 1162 | 2563_ChineseTreeShrewMod_ | GGAGGCTTATGGTGAATATTAACCAAGGTC |
| | diMut_GT8TA_n1 | ACCTCAGTTATCGGAGGAGCAAACAAGGGC |
| | | TAAGTCCAC |
| 1163 | 2564_ChineseTreeShrewMod_ | GGAGGCTTCTGGTGAATATTAACCAAGGTC |
| | diMut_GT8TC_n1 | ACCTCAGTTATCGGAGGAGCAAACAAGGGC |
| | | TAAGTCCAC |
| 1164 | 2566_ChineseTreeShrewMod_ | GGAGGCTGAAGGTGAATATTAACCAAGGTC |
| | diMut_TT9AA_n1 | ACCTCAGTTATCGGAGGAGCAAACAAGGGC |
| | | TAAGTCCAC |
| 1165 | 2567_ChineseTreeShrewMod_ | GGAGGCTGACGGTGAATATTAACCAAGGTC |
| | diMut_TT9AC_n1 | ACCTCAGTTATCGGAGGAGCAAACAAGGGC |
| | | TAAGTCCAC |
| 1166 | 2568_ChineseTreeShrewMod_ | GGAGGCTGAGGGTGAATATTAACCAAGGTC |
| | diMut_TT9AG_n1 | ACCTCAGTTATCGGAGGAGCAAACAAGGGC |
| | | TAAGTCCAC |
| 1167 | 2574_ChineseTreeShrewMod_ | GGAGGCTGGGGGTGAATATTAACCAAGGTC |
| | diMut_TT9GG_n1 | ACCTCAGTTATCGGAGGAGCAAACAAGGGC |
| | | TAAGTCCAC |
| 1168 | 2575_ChineseTreeShrewMod_ | GGAGGCTGTAAGTGAATATTAACCAAGGTC |
| | diMut_TG10AA_n1 | ACCTCAGTTATCGGAGGAGCAAACAAGGGC |
| | | TAAGTCCAC |
| 1169 | 2580_ChineseTreeShrewMod_ | GGAGGCTGTCTGTGAATATTAACCAAGGTC |
| | diMut_TG10CT_n1 | ACCTCAGTTATCGGAGGAGCAAACAAGGGC |
| | | TAAGTCCAC |
| 1170 | 2582_ChineseTreeShrewMod_ | GGAGGCTGTGCGTGAATATTAACCAAGGTC |
| | diMut_TG10GC_n1 | ACCTCAGTTATCGGAGGAGCAAACAAGGGC |
| | | TAAGTCCAC |
| 1171 | 2586_ChineseTreeShrewMod_ | GGAGGCTGTTATTGAATATTAACCAAGGTC |
| | diMut_GG11AT_n1 | ACCTCAGTTATCGGAGGAGCAAACAAGGGC |
| | | TAAGTCCAC |
| 1172 | 2591_ChineseTreeShrewMod_ | GGAGGCTGTTTCTGAATATTAACCAAGGTC |
| | diMut_GG11TC_n1 | ACCTCAGTTATCGGAGGAGCAAACAAGGGC |
| | | TAAGTCCAC |
| 1173 | 2596_ChineseTreeShrewMod_ | GGAGGCTGTTGCAGAATATTAACCAAGGTC |
| | diMut_GT12CA_n1 | ACCTCAGTTATCGGAGGAGCAAACAAGGGC |
| | | TAAGTCCAC |
| 1174 | 2597_ChineseTreeShrewMod_ | GGAGGCTGTTGCCGAATATTAACCAAGGTC |
| | diMut_GT12CC_n1 | ACCTCAGTTATCGGAGGAGCAAACAAGGGC |
| | | TAAGTCCAC |
| 1175 | 2599_ChineseTreeShrewMod_ | GGAGGCTGTTGTAGAATATTAACCAAGGTC |
| | diMut_GT12TA_n1 | ACCTCAGTTATCGGAGGAGCAAACAAGGGC |
| | | TAAGTCCAC |
| 1176 | 2600_ChineseTreeShrewMod_ | GGAGGCTGTTGTCGAATATTAACCAAGGTC |
| | diMut_GT12TC_n1 | ACCTCAGTTATCGGAGGAGCAAACAAGGGC |
| | | TAAGTCCAC |
| 1177 | 2601_ChineseTreeShrewMod_ | GGAGGCTGTTGTGGAATATTAACCAAGGTC |
| | diMut_GT12TG_n1 | ACCTCAGTTATCGGAGGAGCAAACAAGGGC |
| | | TAAGTCCAC |
| 1178 | 2602_ChineseTreeShrewMod_ | GGAGGCTGTTGGAAAATATTAACCAAGGTC |
| | diMut_TG13AA_n1 | ACCTCAGTTATCGGAGGAGCAAACAAGGGC |
| | | TAAGTCCAC |
| 1179 | 2603_ChineseTreeShrewMod_ | GGAGGCTGTTGGACAATATTAACCAAGGTC |
| | diMut_TG13AC_n1 | ACCTCAGTTATCGGAGGAGCAAACAAGGGC |
| | | TAAGTCCAC |
| 1180 | 2605_ChineseTreeShrewMod_ | GGAGGCTGTTGGCAAATATTAACCAAGGTC |
| | diMut_TG13CA_n1 | ACCTCAGTTATCGGAGGAGCAAACAAGGGC |
| | | TAAGTCCAC |
| 1181 | 2606_ChineseTreeShrewMod_ | GGAGGCTGTTGGCCAATATTAACCAAGGTC |
| | diMut_TG13CC_n1 | ACCTCAGTTATCGGAGGAGCAAACAAGGGC |
| | | TAAGTCCAC |
| 1183 | 2608_ChineseTreeShrewMod_ | GGAGGCTGTTGGGAAATATTAACCAAGGTC |
| | diMut_TG13GA_n1 | ACCTCAGTTATCGGAGGAGCAAACAAGGGC |
| | | TAAGTCCAC |
| 1183 | 2609_ChineseTreeShrewMod_ | GGAGGCTGTTGGGCAATATTAACCAAGGTC |
| | diMut_TG13GC_n1 | ACCTCAGTTATCGGAGGAGCAAACAAGGGC |
| | | TAAGTCCAC |
| 1184 | 2610_ChineseTreeShrewMod_ | GGAGGCTGTTGGGTAATATTAACCAAGGTC |
| | diMut_TG13GT_n1 | ACCTCAGTTATCGGAGGAGCAAACAAGGGC |
| | | TAAGTCCAC |
| 1185 | 2611_ChineseTreeShrewMod_ | GGAGGCTGTTGGTACATATTAACCAAGGTC |
| | diMut_GA14AC_n1 | ACCTCAGTTATCGGAGGAGCAAACAAGGGC |
| | | TAAGTCCAC |
| 1186 | 2614_ChineseTreeShrewMod_ | GGAGGCTGTTGGTCCATATTAACCAAGGTC |
| | diMut_GA14CC_n1 | ACCTCAGTTATCGGAGGAGCAAACAAGGGC |
| | | TAAGTCCAC |
| 1187 | 2615_ChineseTreeShrewMod_ | GGAGGCTGTTGGTCGATATTAACCAAGGTC |
| | diMut_GA14CG_n1 | ACCTCAGTTATCGGAGGAGCAAACAAGGGC |
| | | TAAGTCCAC |
| 1188 | 2623_ChineseTreeShrewMod_ | GGAGGCTGTTGGTGGCTATTAACCAAGGTC |
| | diMut_AA15GC_n1 | ACCTCAGTTATCGGAGGAGCAAACAAGGGC |
| | | TAAGTCCAC |
| 1189 | 2626_ChineseTreeShrewMod_ | GGAGGCTGTTGGTGTCTATTAACCAAGGTC |
| | diMut_AA15TC_n1 | ACCTCAGTTATCGGAGGAGCAAACAAGGGC |
| | | TAAGTCCAC |
| 1190 | 2628_ChineseTreeShrewMod_ | GGAGGCTGTTGGTGTTTATTAACCAAGGTC |
| | diMut_AA15TT_n1 | ACCTCAGTTATCGGAGGAGCAAACAAGGGC |
| | | TAAGTCCAC |
| 1191 | 2629_ChineseTreeShrewMod_ | GGAGGCTGTTGGTGACAATTAACCAAGGTC |
| | diMut_AT16CA_n1 | ACCTCAGTTATCGGAGGAGCAAACAAGGGC |
| | | TAAGTCCAC |
| 1192 | 2633_ChineseTreeShrewMod_ | GGAGGCTGTTGGTGAGCATTAACCAAGGTC |
| | diMut_AT16GC_n1 | ACCTCAGTTATCGGAGGAGCAAACAAGGGC |
| | | TAAGTCCAC |
| 1193 | 2635_ChineseTreeShrewMod_ | GGAGGCTGTTGGTGATAATTAACCAAGGTC |
| | diMut_AT16TA_n1 | ACCTCAGTTATCGGAGGAGCAAACAAGGGC |
| | | TAAGTCCAC |
| 1194 | 2636_ChineseTreeShrewMod_ | GGAGGCTGTTGGTGATCATTAACCAAGGTC |
| | diMut_AT16TC_n1 | ACCTCAGTTATCGGAGGAGCAAACAAGGGC |
| | | TAAGTCCAC |
| 1195 | 2640_ChineseTreeShrewMod_ | GGAGGCTGTTGGTGAAATTTAACCAAGGTC |
| | diMut_TA17AT_n1 | ACCTCAGTTATCGGAGGAGCAAACAAGGGC |
| | | TAAGTCCAC |
| 1196 | 2643_ChineseTreeShrewMod_ | GGAGGCTGTTGGTGAACTTTAACCAAGGTC |
| | diMut_TA17CT_n1 | ACCTCAGTTATCGGAGGAGCAAACAAGGGC |
| | | TAAGTCCAC |
| 1197 | 2644_ChineseTreeShrewMod_ | GGAGGCTGTTGGTGAAGCTTAACCAAGGTC |
| | diMut_TA17GC_n1 | ACCTCAGTTATCGGAGGAGCAAACAAGGGC |
| | | TAAGTCCAC |
| 1198 | 2646_ChineseTreeShrewMod_ | GGAGGCTGTTGGTGAAGTTTAACCAAGGTC |
| | diMut_TA17GT_n1 | ACCTCAGTTATCGGAGGAGCAAACAAGGGC |
| | | TAAGTCCAC |
| 1199 | 2647_ChineseTreeShrewMod_ | GGAGGCTGTTGGTGAATCATAACCAAGGTC |
| | diMut_AT18CA_n1 | ACCTCAGTTATCGGAGGAGCAAACAAGGGC |
| | | TAAGTCCAC |
| 1200 | 2651_ChineseTreeShrewMod_ | GGAGGCTGTTGGTGAATGCTAACCAAGGTC |
| | diMut_AT18GC_n1 | ACCTCAGTTATCGGAGGAGCAAACAAGGGC |
| | | TAAGTCCAC |
| 1201 | 2653_ChineseTreeShrewMod_ | GGAGGCTGTTGGTGAATTATAACCAAGGTC |
| | diMut_AT18TA_n1 | ACCTCAGTTATCGGAGGAGCAAACAAGGGC |
| | | TAAGTCCAC |
| 1202 | 2654_ChineseTreeShrewMod_ | GGAGGCTGTTGGTGAATTCTAACCAAGGTC |
| | diMut_AT18TC_n1 | ACCTCAGTTATCGGAGGAGCAAACAAGGGC |
| | | TAAGTCCAC |
| 1203 | 2664_ChineseTreeShrewMod_ | GGAGGCTGTTGGTGAATAGGAACCAAGGTC |
| | diMut_TT19GG_n1 | ACCTCAGTTATCGGAGGAGCAAACAAGGGC |
| | | TAAGTCCAC |
| 1204 | 2672_ChineseTreeShrewMod_ | GGAGGCTGTTGGTGAATATGGACCAAGGTC |
| | diMut_TA20GG_n1 | ACCTCAGTTATCGGAGGAGCAAACAAGGGC |
| | | TAAGTCCAC |
| 1205 | 2678_ChineseTreeShrewMod_ | GGAGGCTGTTGGTGAATATTGGCCAAGGTC |
| | diMut_AA21GG_n1 | ACCTCAGTTATCGGAGGAGCAAACAAGGGC |
| | | TAAGTCCAC |
| 1206 | 2679_ChineseTreeShrewMod_ | GGAGGCTGTTGGTGAATATTGTCCAAGGTC |
| | diMut_AA21GT_n1 | ACCTCAGTTATCGGAGGAGCAAACAAGGGC |
| | | TAAGTCCAC |
| 1207 | 2685_ChineseTreeShrewMod_ | GGAGGCTGTTGGTGAATATTACTCAAGGTC |
| | diMut_AC22CT_n1 | ACCTCAGTTATCGGAGGAGCAAACAAGGGC |
| | | TAAGTCCAC |
| 1208 | 2707_ChineseTreeShrewMod_ | GGAGGCTGTTGGTGAATATTAACTCAGGTC |
| | diMut_CA24TC_n1 | ACCTCAGTTATCGGAGGAGCAAACAAGGGC |
| | | TAAGTCCAC |
| 1209 | 2714_ChineseTreeShrewMod_ | GGAGGCTGTTGGTGAATATTAACCGGGGTC |
| | diMut_AA25GG_n1 | ACCTCAGTTATCGGAGGAGCAAACAAGGGC |
| | | TAAGTCCAC |
| 1210 | 2717_ChineseTreeShrewMod_ | GGAGGCTGTTGGTGAATATTAACCTGGGTC |
| | diMut_AA25TG_n1 | ACCTCAGTTATCGGAGGAGCAAACAAGGGC |
| | | TAAGTCCAC |
| 1211 | 2728_ChineseTreeShrewMod_ | GGAGGCTGTTGGTGAATATTAACCAAAATC |
| | diMut_GG27AA_n1 | ACCTCAGTTATCGGAGGAGCAAACAAGGGC |
| | | TAAGTCCAC |
| 1212 | 2734_ChineseTreeShrewMod_ | GGAGGCTGTTGGTGAATATTAACCAATATC |
| | diMut_GG27TA_n1 | ACCTCAGTTATCGGAGGAGCAAACAAGGGC |
| | | TAAGTCCAC |
| 1213 | 2743_ChineseTreeShrewMod_ | GGAGGCTGTTGGTGAATATTAACCAAGTAC |
| | diMut_GT28TA_n1 | ACCTCAGTTATCGGAGGAGCAAACAAGGGC |
| | | TAAGTCCAC |
| 1214 | 2748_ChineseTreeShrewMod_ | GGAGGCTGTTGGTGAATATTAACCAAGGAT |
| | diMut_TC29AT_n1 | ACCTCAGTTATCGGAGGAGCAAACAAGGGC |
| | | TAAGTCCAC |
| 1215 | 2750_ChineseTreeShrewMod_ | GGAGGCTGTTGGTGAATATTAACCAAGGCG |
| | diMut_TC29CG_n1 | ACCTCAGTTATCGGAGGAGCAAACAAGGGC |
| | | TAAGTCCAC |
| 1216 | 2753_ChineseTreeShrewMod_ | GGAGGCTGTTGGTGAATATTAACCAAGGGG |
| | diMut_TC29GG_n1 | ACCTCAGTTATCGGAGGAGCAAACAAGGGC |
| | | TAAGTCCAC |
| 1217 | 2754_ChineseTreeShrewMod_ | GGAGGCTGTTGGTGAATATTAACCAAGGGT |
| | diMut_TC29GT_n1 | ACCTCAGTTATCGGAGGAGCAAACAAGGGC |
| | | TAAGTCCAC |
| 1218 | 2756_ChineseTreeShrewMod_ | GGAGGCTGTTGGTGAATATTAACCAAGGTA |
| | diMut_CA30AG_n1 | GCCTCAGTTATCGGAGGAGCAAACAAGGGC |
| | | TAAGTCCAC |
| 1219 | 2758_ChineseTreeShrewMod_ | GGAGGCTGTTGGTGAATATTAACCAAGGTG |
| | diMut_CA30GC_n1 | CCCTCAGTTATCGGAGGAGCAAACAAGGGC |
| | | TAAGTCCAC |
| 1220 | 2759_ChineseTreeShrewMod_ | GGAGGCTGTTGGTGAATATTAACCAAGGTG |
| | diMut_CA30GG_n1 | GCCTCAGTTATCGGAGGAGCAAACAAGGGC |
| | | TAAGTCCAC |
| 1221 | 2763_ChineseTreeShrewMod_ | GGAGGCTGTTGGTGAATATTAACCAAGGTT |
| | diMut_CA30TT_n1 | TCCTCAGTTATCGGAGGAGCAAACAAGGGC |
| | | TAAGTCCAC |
| 1222 | 2768_ChineseTreeShrewMod_ | GGAGGCTGTTGGTGAATATTAACCAAGGTC |
| | diMut_AC31GG_n1 | GGCTCAGTTATCGGAGGAGCAAACAAGGGC |
| | | TAAGTCCAC |
| 1223 | 2769_ChineseTreeShrewMod_ | GGAGGCTGTTGGTGAATATTAACCAAGGTC |
| | diMut_AC31GT_n1 | GTCTCAGTTATCGGAGGAGCAAACAAGGGC |
| | | TAAGTCCAC |
| 1224 | 2770_ChineseTreeShrewMod_ | GGAGGCTGTTGGTGAATATTAACCAAGGTC |
| | diMut_AC31TA_n1 | TACTCAGTTATCGGAGGAGCAAACAAGGGC |
| | | TAAGTCCAC |
| 1225 | 2771_ChineseTreeShrewMod_ | GGAGGCTGTTGGTGAATATTAACCAAGGTC |
| | diMut_AC31TG_n1 | TGCTCAGTTATCGGAGGAGCAAACAAGGGC |
| | | TAAGTCCAC |
| 1226 | 2773_ChineseTreeShrewMod_ | GGAGGCTGTTGGTGAATATTAACCAAGGTC |
| | diMut_CC32AA_n1 | AAATCAGTTATCGGAGGAGCAAACAAGGGC |
| | | TAAGTCCAC |
| 1227 | 2774_ChineseTreeShrewMod_ | GGAGGCTGTTGGTGAATATTAACCAAGGTC |
| | diMut_CC32AG_n1 | AAGTCAGTTATCGGAGGAGCAAACAAGGGC |
| | | TAAGTCCAC |
| 1228 | 2778_ChineseTreeShrewMod_ | GGAGGCTGTTGGTGAATATTAACCAAGGIC |
| | diMut_CC32GT_n1 | AGTTCAGITATCGGAGGAGCAAACAAGGGC |
| | | TAAGTCCAC |
| 1229 | 2779_ChineseTreeShrewMod_ | GGAGGCTGTTGGTGAATATTAACCAAGGTC |
| | diMut_CC32TA_n1 | ATATCAGTTATCGGAGGAGCAAACAAGGGC |
| | | TAAGTCCAC |
| 1230 | 2780_ChineseTreeShrewMod_ | GGAGGCTGTTGGTGAATATTAACCAAGGTC |
| | diMut_CC32TG_n1 | ATGTCAGTTATCGGAGGAGCAAACAAGGGC |
| | | TAAGTCCAC |
| 1231 | 2781_ChineseTreeShrewMod_ | GGAGGCTGTTGGTGAATATTAACCAAGGTC |
| | diMut_CC32TT_n1 | ATTTCAGTTATCGGAGGAGCAAACAAGGGC |
| | | TAAGTCCAC |
| 1232 | 2782_ChineseTreeShrewMod_ | GGAGGCTGTTGGTGAATATTAACCAAGGTC |
| | diMut_CT33AA_n1 | ACAACAGTTATCGGAGGAGCAAACAAGGGC |
| | | TAAGTCCAC |
| 1233 | 2783_ChineseTreeShrewMod_ | GGAGGCTGTTGGTGAATATTAACCAAGGTC |
| | diMut_CT33AC_n1 | ACACCAGTTATCGGAGGAGCAAACAAGGGC |
| | | TAAGTCCAC |
| 1234 | 2784_ChineseTreeShrewMod_ | GGAGGCTGTTGGTGAATATTAACCAAGGTC |
| | diMut_CT33AG_n1 | ACAGCAGTTATCGGAGGAGCAAACAAGGGC |
| | | TAAGTCCAC |
| 1235 | 2785_ChineseTreeShrewMod_ | GGAGGCTGTTGGTGAATATTAACCAAGGTC |
| | diMut_CT33GA_n1 | ACGACAGTTATCGGAGGAGCAAACAAGGGC |
| | | TAAGTCCAC |
| 1236 | 2786_ChineseTreeShrewMod_ | GGAGGCTGTTGGTGAATATTAACCAAGGTC |
| | diMut_CT33GC_n1 | ACGCCAGTTATCGGAGGAGCAAACAAGGGC |
| | | TAAGTCCAC |
| 1237 | 2789_ChineseTreeShrewMod_ | GGAGGCTGTTGGTGAATATTAACCAAGGTC |
| | diMut_CT33TC_n1 | ACTCCAGTTATCGGAGGAGCAAACAAGGGC |
| | | TAAGTCCAC |
| 1238 | 2791_ChineseTreeShrewMod_ | GGAGGCTGTTGGTGAATATTAACCAAGGTC |
| | diMut_TC34AA_n1 | ACCAAAGTTATCGGAGGAGCAAACAAGGGC |
| | | TAAGTCCAC |
| 1239 | 2792_ChineseTreeShrewMod_ | GGAGGCTGTTGGTGAATATTAACCAAGGTC |
| | diMut_TC34AG_n1 | ACCAGAGTTATCGGAGGAGCAAACAAGGGC |
| | | TAAGTCCAC |
| 1240 | 2793_ChineseTreeShrewMod_ | GGAGGCTGTTGGTGAATATTAACCAAGGTC |
| | diMut_TC34AT_n1 | ACCATAGTTATCGGAGGAGCAAACAAGGGC |
| | | TAAGTCCAC |
| 1241 | 2798_ChineseTreeShrewMod_ | GGAGGCTGTTGGTGAATATTAACCAAGGTC |
| | diMut_TC34GG_n1 | ACCGGAGTTATCGGAGGAGCAAACAAGGGC |
| | | TAAGTCCAC |
| 1242 | 2799_ChineseTreeShrewMod_ | GGAGGCTGTTGGTGAATATTAACCAAGGTC |
| | diMut_TC34GT_n1 | ACCGTAGTTATCGGAGGAGCAAACAAGGGC |
| | | TAAGTCCAC |
| 1243 | 2800_ChineseTreeShrewMod_ | GGAGGCTGTTGGTGAATATTAACCAAGGTC |
| | diMut_CA35AC_n1 | ACCTACGTTATCGGAGGAGCAAACAAGGGC |
| | | TAAGTCCAC |
| 1244 | 2801_ChineseTreeShrewMod_ | GGAGGCTGTTGGTGAATATTAACCAAGGTC |
| | diMut_CA35AG_n1 | ACCTAGGTTATCGGAGGAGCAAACAAGGGC |
| | | TAAGTCCAC |
| 1245 | 2802_ChineseTreeShrewMod_ | GGAGGCTGTTGGTGAATATTAACCAAGGTC |
| | diMut_CA35AT_n1 | ACCTATGTTATCGGAGGAGCAAACAAGGGC |
| | | TAAGTCCAC |
| 1246 | 2803_ChineseTreeShrewMod_ | GGAGGCTGTTGGTGAATATTAACCAAGGTC |
| | diMut_CA35GC_n1 | ACCTGCGTTATCGGAGGAGCAAACAAGGGC |
| | | TAAGTCCAC |
| 1247 | 2804_ChineseTreeShrewMod_ | GGAGGCTGTTGGTGAATATTAACCAAGGTC |
| | diMut_CA35GG_n1 | ACCTGGGTTATCGGAGGAGCAAACAAGGGC |
| | | TAAGTCCAC |
| 1248 | 2808_ChineseTreeShrewMod_ | GGAGGCTGTTGGTGAATATTAACCAAGGTC |
| | diMut_CA35TT_n1 | ACCTTTGTTATCGGAGGAGCAAACAAGGGC |
| | | TAAGTCCAC |
| 1249 | 2810_ChineseTreeShrewMod_ | GGAGGCTGTTGGTGAATATTAACCAAGGTC |
| | diMut_AG36CC_n1 | ACCTCCCTTATCGGAGGAGCAAACAAGGGC |
| | | TAAGTCCAC |
| 1250 | 2811_ChineseTreeShrewMod_ | GGAGGCTGTTGGTGAATATTAACCAAGGTC |
| | diMut_AG36CT_n1 | ACCTCCTTTATCGGAGGAGCAAACAAGGGC |
| | | TAAGTCCAC |
| 1251 | 2813_ChineseTreeShrewMod_ | GGAGGCTGTTGGTGAATATTAACCAAGGTC |
| | diMut_AG36GC_n1 | ACCTCGCTTATCGGAGGAGCAAACAAGGGC |
| | | TAAGTCCAC |
| 1252 | 2814_ChineseTreeShrewMod_ | GGAGGCTGTTGGTGAATATTAACCAAGGTC |
| | diMut_AG36GT_n1 | ACCTCGTTTATCGGAGGAGCAAACAAGGGC |
| | | TAAGTCCAC |
| 1253 | 2815_ChineseTreeShrewMod_ | GGAGGCTGTTGGTGAATATTAACCAAGGTC |
| | diMut_AG36TA_n1 | ACCTCTATTATCGGAGGAGCAAACAAGGGC |
| | | TAAGTCCAC |
| 1254 | 2816_ChineseTreeShrewMod_ | GGAGGCTGTTGGTGAATATTAACCAAGGTC |
| | diMut_AG36TC_n1 | ACCTCTCTTATCGGAGGAGCAAACAAGGGC |
| | | TAAGTCCAC |
| 1255 | 2820_ChineseTreeShrewMod_ | GGAGGCTGTTGGTGAATATTAACCAAGGTC |
| | diMut_GT37AG_n1 | ACCTCAAGTATCGGAGGAGCAAACAAGGGC |
| | | TAAGTCCAC |
| 1256 | 2821_ChineseTreeShrewMod_ | GGAGGCTGTTGGTGAATATTAACCAAGGTC |
| | diMut_GT37CA_n1 | ACCTCACATATCGGAGGAGCAAACAAGGGC |
| | | TAAGTCCAC |
| 1257 | 2825_ChineseTreeShrewMod_ | GGAGGCTGTTGGTGAATATTAACCAAGGTC |
| | diMut_GT37TC_n1 | ACCTCATCTATCGGAGGAGCAAACAAGGGC |
| | | TAAGTCCAC |
| 1258 | 2831_ChineseTreeShrewMod_ | GGAGGCTGTTGGTGAATATTAACCAAGGTC |
| | diMut_TT38CC_n1 | ACCTCAGCCATCGGAGGAGCAAACAAGGGC |
| | | TAAGTCCAC |
| 1259 | 2832_ChineseTreeShrewMod_ | GGAGGCTGTTGGTGAATATTAACCAAGGTC |
| | diMut_TT38CG_n1 | ACCTCAGCGATCGGAGGAGCAAACAAGGGC |
| | | TAAGTCCAC |
| 1260 | 2833_ChineseTreeShrewMod_ | GGAGGCTGTTGGTGAATATTAACCAAGGTC |
| | diMut_TT38GA_n1 | ACCTCAGGAATCGGAGGAGCAAACAAGGGC |
| | | TAAGTCCAC |
| 1261 | 2834_ChineseTreeShrewMod_ | GGAGGCTGTTGGTGAATATTAACCAAGGTC |
| | diMut_TT38GC_n1 | ACCTCAGGCATCGGAGGAGCAAACAAGGGC |
| | | TAAGTCCAC |
| 1262 | 2836_ChineseTreeShrewMod_ | GGAGGCTGTTGGTGAATATTAACCAAGGTC |
| | diMut_TA39AC_n1 | ACCTCAGTACTCGGAGGAGCAAACAAGGGC |
| | | TAAGTCCAC |
| 1263 | 2837_ChineseTreeShrewMod_ | GGAGGCTGTTGGTGAATATTAACCAAGGTC |
| | diMut_TA39AG_n1 | ACCTCAGTAGTCGGAGGAGCAAACAAGGGC |
| | | TAAGTCCAC |
| 1264 | 2838_ChineseTreeShrewMod_ | GGAGGCTGTTGGTGAATATTAACCAAGGTC |
| | diMut_TA39AT_n1 | ACCTCAGTATTCGGAGGAGCAAACAAGGGC |
| | | TAAGTCCAC |
| 1265 | 2843_ChineseTreeShrewMod_ | GGAGGCTGTTGGTGAATATTAACCAAGGTC |
| | diMut_TA39GG_n1 | ACCTCAGTGGTCGGAGGAGCAAACAAGGGC |
| | | TAAGTCCAC |
| 1266 | 2846_ChineseTreeShrewMod_ | GGAGGCTGTTGGTGAATATTAACCAAGGTC |
| | diMut_AT40CC_n1 | ACCTCAGTTCCCGGAGGAGCAAACAAGGGC |
| | | TAAGTCCAC |
| 1267 | 2847_ChineseTreeShrewMod_ | GGAGGCTGTTGGTGAATATTAACCAAGGTC |
| | diMut_AT40CG_n1 | ACCTCAGTTCGCGGAGGAGCAAACAAGGGC |
| | | TAAGTCCAC |
| 1268 | 2848_ChineseTreeShrewMod_ | GGAGGCTGTTGGTGAATATTAACCAAGGTC |
| | diMut_AT40GA_n1 | ACCTCAGTTGACGGAGGAGCAAACAAGGGC |
| | | TAAGTCCAC |
| 1269 | 2849_ChineseTreeShrewMod_ | GGAGGCTGTTGGTGAATATTAACCAAGGTC |
| | diMut_AT40GC_n1 | ACCTCAGTTGCCGGAGGAGCAAACAAGGGC |
| | | TAAGTCCAC |
| 1270 | 2851_ChineseTreeShrewMod_ | GGAGGCTGTTGGTGAATATTAACCAAGGTC |
| | diMut_AT40TA_n1 | ACCTCAGTTTACGGAGGAGCAAACAAGGGC |
| | | TAAGTCCAC |
| 1271 | 2852_ChineseTreeShrewMod_ | GGAGGCTGTTGGTGAATATTAACCAAGGTC |
| | diMut_AT40TC_n1 | ACCTCAGTTTCCGGAGGAGCAAACAAGGGC |
| | | TAAGTCCAC |
| 1272 | 2855_ChineseTreeShrewMod_ | GGAGGCTGTTGGTGAATATTAACCAAGGTC |
| | diMut_TC41AG_n1 | ACCTCAGTTAAGGGAGGAGCAAACAAGGGC |
| | | TAAGTCCAC |
| 1273 | 2858_ChineseTreeShrewMod_ | GGAGGCTGTTGGTGAATATTAACCAAGGTC |
| | diMut_TC41CG_n1 | ACCTCAGTTACGGGAGGAGCAAACAAGGGC |
| | | TAAGTCCAC |
| 1274 | 2862_ChineseTreeShrewMod_ | GGAGGCTGTTGGTGAATATTAACCAAGGTC |
| | diMut_TC41GT_n1 | ACCTCAGTTAGTGGAGGAGCAAACAAGGGC |
| | | TAAGTCCAC |
| 1275 | 2864_ChineseTreeShrewMod_ | GGAGGCTGTTGGTGAATATTAACCAAGGTC |
| | diMut_CG42AC_n1 | ACCTCAGTTATACGAGGAGCAAACAAGGGC |
| | | TAAGTCCAC |
| 1276 | 2866_ChineseTreeShrewMod_ | GGAGGCTGTTGGTGAATATTAACCAAGGTC |
| | diMut_CG42GA_n1 | ACCTCAGTTATGAGAGGAGCAAACAAGGGC |
| | | TAAGTCCAC |
| 1277 | 2867_ChineseTreeShrewMod_ | GGAGGCTGTTGGTGAATATTAACCAAGGTC |
| | diMut_CG42GC_n1 | ACCTCAGTTATGCGAGGAGCAAACAAGGGC |
| | | TAAGTCCAC |
| 1278 | 2868_ChineseTreeShrewMod_ | GGAGGCTGTTGGTGAATATTAACCAAGGTC |
| | diMut_CG42GT_n1 | ACCTCAGTTATGTGAGGAGCAAACAAGGGC |
| | | TAAGTCCAC |
| 1279 | 2869_ChineseTreeShrewMod_ | GGAGGCTGTTGGTGAATATTAACCAAGGTC |
| | diMut_CG42TA_n1 | ACCTCAGTTATTAGAGGAGCAAACAAGGGC |
| | | TAAGTCCAC |
| 1280 | 2870_ChineseTreeShrewMod_ | GGAGGCTGTTGGTGAATATTAACCAAGGTC |
| | diMut_CG42TC_n1 | ACCTCAGTTATTCGAGGAGCAAACAAGGGC |
| | | TAAGTCCAC |
| 1281 | 2872_ChineseTreeShrewMod_ | GGAGGCTGTTGGTGAATATTAACCAAGGTC |
| | diMut_GG43AA_n1 | ACCTCAGTTATCAAAGGAGCAAACAAGGGC |
| | | TAAGTCCAC |
| 1282 | 2873_ChineseTreeShrewMod_ | GGAGGCTGTTGGTGAATATTAACCAAGGTC |
| | diMut_GG43AC_n1 | ACCTCAGTTATCACAGGAGCAAACAAGGGC |
| | | TAAGTCCAC |
| 1283 | 2874_ChineseTreeShrewMod_ | GGAGGCTGTTGGTGAATATTAACCAAGGTC |
| | diMut_GG43AT_n1 | ACCTCAGTTATCATAGGAGCAAACAAGGGC |
| | | TAAGTCCAC |
| 1284 | 2879_ChineseTreeShrewMod_ | GGAGGCTGTTGGTGAATATTAACCAAGGTC |
| | diMut_GG43TC_n1 | ACCTCAGTTATCTCAGGAGCAAACAAGGGC |
| | | TAAGTCCAC |
| 1285 | 2880_ChineseTreeShrewMod_ | GGAGGCTGTTGGTGAATATTAACCAAGGTC |
| | diMut_GG43TT_n1 | ACCTCAGTTATCTTAGGAGCAAACAAGGGC |
| | | TAAGTCCAC |
| 1286 | 2882_ChineseTreeShrewMod_ | GGAGGCTGTTGGTGAATATTAACCAAGGTC |
| | diMut_GA44AG_n1 | ACCTCAGTTATCGAGGGAGCAAACAAGGGC |
| | | TAAGTCCAC |
| 1287 | 2884_ChineseTreeShrewMod_ | GGAGGCTGTTGGTGAATATTAACCAAGGTC |
| | diMut_GA44CC_n1 | ACCTCAGTTATCGCCGGAGCAAACAAGGGC |
| | | TAAGTCCAC |
| 1288 | 2886_ChineseTreeShrewMod_ | GGAGGCTGTTGGTGAATATTAACCAAGGTC |
| | diMut_GA44CT_n1 | ACCTCAGTTATCGCTGGAGCAAACAAGGGC |
| | | TAAGTCCAC |
| 1289 | 2890_ChineseTreeShrewMod_ | GGAGGCTGTTGGTGAATATTAACCAAGGTC |
| | diMut_AG45CA_n1 | ACCTCAGTTATCGGCAGAGCAAACAAGGGC |
| | | TAAGTCCAC |
| 1290 | 2891_ChineseTreeShrewMod_ | GGAGGCTGTTGGTGAATATTAACCAAGGTC |
| | diMut_AG45CC_n1 | ACCTCAGTTATCGGCCGAGCAAACAAGGGC |
| | | TAAGTCCAC |
| 1291 | 2892_ChineseTreeShrewMod_ | GGAGGCTGTTGGTGAATATTAACCAAGGTC |
| | diMut_AG45CT_n1 | ACCTCAGTTATCGGCTGAGCAAACAAGGGC |
| | | TAAGTCCAC |
| 1292 | 2893_ChineseTreeShrewMod_ | GGAGGCTGTTGGTGAATATTAACCAAGGTC |
| | diMut_AG45GA_n1 | ACCTCAGTTATCGGGAGAGCAAACAAGGGC |
| | | TAAGTCCAC |
| 1293 | 2894_ChineseTreeShrewMod_ | GGAGGCTGTTGGTGAATATTAACCAAGGTC |
| | diMut_AG45GC_n1 | ACCTCAGTTATCGGGCGAGCAAACAAGGGC |
| | | TAAGTCCAC |
| 1294 | 2895_ChineseTreeShrewMod_ | GGAGGCTGTTGGTGAATATTAACCAAGGTC |
| | diMut_AG45GT_n1 | ACCTCAGTTATCGGGTGAGCAAACAAGGGC |
| | | TAAGTCCAC |
| 1295 | 2896_ChineseTreeShrewMod_ | GGAGGCTGTTGGTGAATATTAACCAAGGTC |
| | diMut_AG45TA_n1 | ACCTCAGTTATCGGTAGAGCAAACAAGGGC |
| | | TAAGTCCAC |
| 1296 | 2897_ChineseTreeShrewMod_ | GGAGGCTGTTGGTGAATATTAACCAAGGTC |
| | diMut_AG45TC_n1 | ACCTCAGTTATCGGTCGAGCAAACAAGGGC |
| | | TAAGTCCAC |
| 1297 | 2898_ChineseTreeShrewMod_ | GGAGGCTGTTGGTGAATATTAACCAAGGTC |
| | diMut_AG45TT_n1 | ACCTCAGTTATCGGTTGAGCAAACAAGGGC |
| | | TAAGTCCAC |
| 1298 | 2899_ChineseTreeShrewMod_ | GGAGGCTGTTGGTGAATATTAACCAAGGTC |
| | diMut_GG46AA_n1 | ACCTCAGTTATCGGAAAAGCAAACAAGGGC |
| | | TAAGTCCAC |
| 1299 | 2900_ChineseTreeShrewMod_ | GGAGGCTGTTGGTGAATATTAACCAAGGTC |
| | diMut_GG46AC_n1 | ACCTCAGTTATCGGAACAGCAAACAAGGGC |
| | | TAAGTCCAC |
| 1300 | 2901_ChineseTreeShrewMod_ | GGAGGCTGTTGGTGAATATTAACCAAGGTC |
| | diMut_GG46AT_n1 | ACCTCAGTTATCGGAATAGCAAACAAGGGC |
| | | TAAGTCCAC |
| 1301 | 2902_ChineseTreeShrewMod_ | GGAGGCTGTTGGTGAATATTAACCAAGGTC |
| | diMut_GG46CA_n1 | ACCTCAGTTATCGGACAAGCAAACAAGGGC |
| | | TAAGTCCAC |
| 1302 | 2903_ChineseTreeShrewMod_ | GGAGGCTGTTGGTGAATATTAACCAAGGTC |
| | diMut_GG46CC_n1 | ACCTCAGTTATCGGACCAGCAAACAAGGGC |
| | | TAAGTCCAC |
| 1303 | 2905_ChineseTreeShrewMod_ | GGAGGCTGTTGGTGAATATTAACCAAGGTC |
| | diMut_GG46TA_n1 | ACCTCAGTTATCGGATAAGCAAACAAGGGC |
| | | TAAGTCCAC |
| 1304 | 2906_ChineseTreeShrewMod_ | GGAGGCTGTTGGTGAATATTAACCAAGGTC |
| | diMut_GG46TC_n1 | ACCTCAGTTATCGGATCAGCAAACAAGGGC |
| | | TAAGTCCAC |
| 1305 | 2908_ChineseTreeShrewMod_ | GGAGGCTGTTGGTGAATATTAACCAAGGTC |
| | diMut_GA47AC_n1 | ACCTCAGTTATCGGAGACGCAAACAAGGGC |
| | | TAAGTCCAC |
| 1306 | 2909_ChineseTreeShrewMod_ | GGAGGCTGTTGGTGAATATTAACCAAGGTC |
| | diMut_GA47AG_n1 | ACCTCAGTTATCGGAGAGGCAAACAAGGGC |
| | | TAAGTCCAC |
| 1307 | 2911_ChineseTreeShrewMod_ | GGAGGCTGTTGGTGAATATTAACCAAGGTC |
| | diMut_GA47CC_n1 | ACCTCAGTTATCGGAGCCGCAAACAAGGGC |
| | | TAAGTCCAC |
| 1308 | 2912_ChineseTreeShrewMod_ | GGAGGCTGTTGGTGAATATTAACCAAGGTC |
| | diMut_GA47CG_n1 | ACCTCAGTTATCGGAGCGGCAAACAAGGGC |
| | | TAAGTCCAC |
| 1309 | 2915_ChineseTreeShrewMod_ | GGAGGCTGTTGGTGAATATTAACCAAGGTC |
| | diMut_GA47TG_n1 | ACCTCAGTTATCGGAGTGGCAAACAAGGGC |
| | | TAAGTCCAC |
| 1310 | 2917_ChineseTreeShrewMod_ | GGAGGCTGTTGGTGAATATTAACCAAGGTC |
| | diMut_AG48CA_n1 | ACCTCAGTTATCGGAGGCACAAACAAGGGC |
| | | TAAGTCCAC |
| 1311 | 2919_ChineseTreeShrewMod_ | GGAGGCTGTTGGTGAATATTAACCAAGGTC |
| | diMut_AG48CT_n1 | ACCTCAGTTATCGGAGGCTCAAACAAGGGC |
| | | TAAGTCCAC |
| 1312 | 2921_ChineseTreeShrewMod_ | GGAGGCTGTTGGTGAATATTAACCAAGGTC |
| | diMut_AG48GC_n1 | ACCTCAGTTATCGGAGGGCCAAACAAGGGC |
| | | TAAGTCCAC |
| 1313 | 2922_ChineseTreeShrewMod_ | GGAGGCTGTTGGTGAATATTAACCAAGGTC |
| | diMut_AG48GT_n1 | ACCTCAGTTATCGGAGGGTCAAACAAGGGC |
| | | TAAGTCCAC |
| 1314 | 2923_ChineseTreeShrewMod_ | GGAGGCTGTTGGTGAATATTAACCAAGGTC |
| | diMut_AG48TA_n1 | ACCTCAGTTATCGGAGGTACAAACAAGGGC |
| | | TAAGTCCAC |
| 1315 | 2924_ChineseTreeShrewMod_ | GGAGGCTGTTGGTGAATATTAACCAAGGTC |
| | diMut_AG48TC_n1 | ACCTCAGTTATCGGAGGTCCAAACAAGGGC |
| | | TAAGTCCAC |
| 1316 | 2928_ChineseTreeShrewMod_ | GGAGGCTGTTGGTGAATATTAACCAAGGTC |
| | diMut_GC49AT_n1 | ACCTCAGTTATCGGAGGAATAAACAAGGGC |
| | | TAAGTCCAC |
| 1317 | 2931_ChineseTreeShrewMod_ | GGAGGCTGTTGGTGAATATTAACCAAGGTC |
| | diMut_GC49CT_n1 | ACCTCAGTTATCGGAGGACTAAACAAGGGC |
| | | TAAGTCCAC |
| 1318 | 2934_ChineseTreeShrewMod_ | GGAGGCTGTTGGTGAATATTAACCAAGGTC |
| | diMut_GC49TT_n1 | ACCTCAGTTATCGGAGGATTAAACAAGGGC |
| | | TAAGTCCAC |
| 1319 | 2940_ChineseTreeShrewMod_ | GGAGGCTGTTGGTGAATATTAACCAAGGTC |
| | diMut_CA50GT_n1 | ACCTCAGTTATCGGAGGAGGTAACAAGGGC |
| | | TAAGTCCAC |
| 1320 | 2959_ChineseTreeShrewMod_ | GGAGGCTGTTGGTGAATATTAACCAAGGTC |
| | diMut_AA52TC_n1 | ACCTCAGTTATCGGAGGAGCATCCAAGGGC |
| | | TAAGTCCAC |
| 1321 | 2973_ChineseTreeShrewMod_ | GGAGGCTGTTGGTGAATATTAACCAAGGTC |
| | diMut_CA54AT_n1 | ACCTCAGTTATCGGAGGAGCAAAATAGGGC |
| | | TAAGTCCAC |
| 1322 | 2977_ChineseTreeShrewMod_ | GGAGGCTGTTGGTGAATATTAACCAAGGTC |
| | diMut_CA54TC_n1 | ACCTCAGTTATCGGAGGAGCAAATCAGGGC |
| | | TAAGTCCAC |
| 1323 | 2978_ChineseTreeShrewMod_ | GGAGGCTGTTGGTGAATATTAACCAAGGTC |
| | diMut_CA54TG_n1 | ACCTCAGTTATCGGAGGAGCAAATGAGGGC |
| | | TAAGTCCAC |
| 1324 | 2995_ChineseTreeShrewMod_ | GGAGGCTGTTGGTGAATATTAACCAAGGTC |
| | diMut_AG56TA_n1 | ACCTCAGTTATCGGAGGAGCAAACATAGGC |
| | | TAAGTCCAC |
| 1325 | 3013_ChineseTreeShrewMod_ | GGAGGCTGTTGGTGAATATTAACCAAGGTC |
| | diMut_GG58TA_n1 | ACCTCAGTTATCGGAGGAGCAAACAAGTAC |
| | | TAAGTCCAC |
| 1326 | 3014_ChineseTreeShrewMod_ | GGAGGCTGTTGGTGAATATTAACCAAGGTC |
| | diMut_GG58TC_n1 | ACCTCAGTTATCGGAGGAGCAAACAAGTCC |
| | | TAAGTCCAC |
| 1327 | 3015_ChineseTreeShrewMod_ | GGAGGCTGTTGGTGAATATTAACCAAGGTC |
| | diMut_GG58TT_n1 | ACCTCAGTTATCGGAGGAGCAAACAAGTTC |
| | | TAAGTCCAC |
| 1328 | 3025_ChineseTreeShrewMod_ | GGAGGCTGTTGGTGAATATTAACCAAGGTC |
| | diMut_CT60AA_n1 | ACCTCAGTTATCGGAGGAGCAAACAAGGGA |
| | | AAAGTCCAC |
| 1329 | 3028_ChineseTreeShrewMod_ | GGAGGCTGTTGGTGAATATTAACCAAGGTC |
| | diMut_CT60GA_n1 | ACCTCAGTTATCGGAGGAGCAAACAAGGGG |
| | | AAAGTCCAC |
| 1330 | 3031_ChineseTreeShrewMod_ | GGAGGCTGTTGGTGAATATTAACCAAGGTC |
| | diMut_CT60TA_n1 | ACCTCAGTTATCGGAGGAGCAAACAAGGGT |
| | | AAAGTCCAC |
| 1331 | 3036_ChineseTreeShrewMod_ | GGAGGCTGTTGGTGAATATTAACCAAGGTC |
| | diMut_TA61AT_n1 | ACCTCAGTTATCGGAGGAGCAAACAAGGGC |
| | | ATAGTCCAC |
| 1332 | 3073_ChineseTreeShrewMod_ | GGAGGCTGTTGGTGAATATTAACCAAGGTC |
| | diMut_TC65CA_n1 | ACCTCAGTTATCGGAGGAGCAAACAAGGGC |
| | | TAAGCACAC |
| 1333 | 3078_ChineseTreeShrewMod_ | GGAGGCTGTTGGTGAATATTAACCAAGGTC |
| | diMut_TC65GT_n1 | ACCTCAGTTATCGGAGGAGCAAACAAGGGC |
| | | TAAGGTCAC |
| 1334 | 3079_ChineseTreeShrewMod_ | GGAGGCTGTTGGTGAATATTAACCAAGGTC |
| | diMut_CC66AA_n1 | ACCTCAGTTATCGGAGGAGCAAACAAGGGC |
| | | TAAGTAAAC |
| 1335 | 3090_ChineseTreeShrewMod_ | GGAGGCTGTTGGTGAATATTAACCAAGGTC |
| | diMut_CA67AT_n1 | ACCTCAGTTATCGGAGGAGCAAACAAGGGC |
| | | TAAGTCATC |

TABLE 12
Single and adjacent di-nucleotide variants of BushBaby SERPINA1 enhancer with higher luciferase
expression than original sequence SEQ ID NO: 83

| SEQ ID NO: | Bushbaby SERPINA1 enhancer variant | Sequence |
|---|---|---|
| 1336 | 1256_Bushbaby_monoMut_G1A_n1 | AGGGGAAGCTACTGGTGAATATTAACCAAGGTCACCCAGTTATCAGGGAGCAAACAGGAGCTAAGTCCAT |
| 1337 | 1262_Bushbaby_monoMut_G3A_n1 | GGAGGAAGCTACTGGTGAATATTAACCAAGGTCACCCAGTTATCAGGGAGCAAACAGGAGCTAAGTCCAT |
| 1338 | 1263_Bushbaby_monoMut_G3C_n1 | GGCGGAAGCTACTGGTGAATATTAACCAAGGTCACCCAGTTATCAGGGAGCAAACAGGAGCTAAGTCCAT |
| 1339 | 1270_Bushbaby_monoMut_G5T_n1 | GGGGTAAGCTACTGGTGAATATTAACCAAGGTCACCCAGTTATCAGGGAGCAAACAGGAGCTAAGTCCAT |
| 1340 | 1273_Bushbaby_monoMut_A6T_n1 | GGGGGTAGCTACTGGTGAATATTAACCAAGGTCACCCAGTTATCAGGGAGCAAACAGGAGCTAAGTCCAT |
| 1341 | 1277_Bushbaby_monoMut_G8A_n1 | GGGGGAAACTACTGGTGAATATTAACCAAGGTCACCCAGTTATCAGGGAGCAAACAGGAGCTAAGTCCAT |
| 1342 | 1282_Bushbaby_monoMut_C9T_n1 | GGGGGAAGTTACTGGTGAATATTAACCAAGGTCACCCAGTTATCAGGGAGCAAACAGGAGCTAAGTCCAT |
| 1343 | 1284_Bushbaby_monoMut_T10C_n1 | GGGGGAAGCCACTGGTGAATATTAACCAAGGTCACCCAGTTATCAGGGAGCAAACAGGAGCTAAGTCCAT |
| 1344 | 1286_Bushbaby_monoMut_A11C_n1 | GGGGGAAGCTCCTGGTGAATATTAACCAAGGTCACCCAGTTATCAGGGAGCAAACAGGAGCTAAGTCCAT |
| 1345 | 1287_Bushbaby_monoMut_A11G_n1 | GGGGGAAGCTGCTGGTGAATATTAACCAAGGTCACCCAGTTATCAGGGAGCAAACAGGAGCTAAGTCCAT |
| 1346 | 1288_Bushbaby_monoMut_A11T_n1 | GGGGGAAGCTTCTGGTGAATATTAACCAAGGTCACCCAGTTATCAGGGAGCAAACAGGAGCTAAGTCCAT |
| 1347 | 1294_Bushbaby_monoMut_T13G_n1 | GGGGGAAGCTACGGGTGAATATTAACCAAGGTCACCCAGTTATCAGGGAGCAAACAGGAGCTAAGTCCAT |
| 1348 | 1300_Bushbaby_monoMut_G15T_n1 | GGGGGAAGCTACTGTTGAATATTAACCAAGGTCACCCAGTTATCAGGGAGCAAACAGGAGCTAAGTCCAT |
| 1349 | 1306_Bushbaby_monoMut_G17T_n1 | GGGGGAAGCTACTGGTTAATATTAACCAAGGTCACCCAGTTATCAGGGAGCAAACAGGAGCTAAGTCCAT |
| 1350 | 1310_Bushbaby_monoMut_A19C_n1 | GGGGGAAGCTACTGGTGACTATTAACCAAGGTCACCCAGTTATCAGGGAGCAAACAGGAGCTAAGTCCAT |
| 1351 | 1311_Bushbaby_monoMut_A19G_n1 | GGGGGAAGCTACTGGTGAGTATTAACCAAGGTCACCCAGTTATCAGGGAGCAAACAGGAGCTAAGTCCAT |
| 1352 | 1324_Bushbaby_monoMut_T23G_n1 | GGGGGAAGCTACTGGTGAATATGAACCAAGGTCACCCAGTTATCAGGGAGCAAACAGGAGCTAAGTCCAT |
| 1353 | 1330_Bushbaby_monoMut_A25T_n1 | GGGGGAAGCTACTGGTGAATATTATCCAAGGTCACCCAGTTATCAGGGAGCAAACAGGAGCTAAGTCCAT |
| 1354 | 1352_Bushbaby_monoMut_C33A_n1 | GGGGGAAGCTACTGGTGAATATTAACCAAGGTAACCCAGTTATCAGGGAGCAAACAGGAGCTAAGTCCAT |
| 1355 | 1359_Bushbaby_monoMut_C35G_n1 | GGGGGAAGCTACTGGTGAATATTAACCAAGGTCAGCCAGTTATCAGGGAGCAAACAGGAGCTAAGTCCAT |
| 1356 | 1360_Bushbaby_monoMut_C35T_n1 | GGGGGAAGCTACTGGTGAATATTAACCAAGGTCATCCAGTTATCAGGGAGCAAACAGGAGCTAAGTCCAT |
| 1357 | 1361_Bushbaby_monoMut_C36A_n1 | GGGGGAAGCTACTGGTGAATATTAACCAAGGTCACACAGTTATCAGGGAGCAAACAGGAGCTAAGTCCAT |
| 1358 | 1362_Bushbaby_monoMut_C36G_n1 | GGGGGAAGCTACTGGTGAATATTAACCAAGGTCACGCAGTTATCAGGGAGCAAACAGGAGCTAAGTCCAT |
| 1359 | 1363_Bushbaby_monoMut_C36T_n1 | GGGGGAAGCTACTGGTGAATATTAACCAAGGTCACTCAGTTATCAGGGAGCAAACAGGAGCTAAGTCCAT |
| 1360 | 1365_Bushbaby_monoMut_C37G_n1 | GGGGGAAGCTACTGGTGAATATTAACCAAGGTCACCGAGTTATCAGGGAGCAAACAGGAGCTAAGTCCAT |
| 1361 | 1367_Bushbaby_monoMut_A38C_n1 | GGGGGAAGCTACTGGTGAATATTAACCAAGGTCACCCCGTTATCAGGGAGCAAACAGGAGCTAAGTCCAT |
| 1362 | 1368_Bushbaby_monoMut_A38G_n1 | GGGGGAAGCTACTGGTGAATATTAACCAAGGTCACCCGGTTATCAGGGAGCAAACAGGAGCTAAGTCCAT |
| 1363 | 1372_Bushbaby_monoMut_G39T_n1 | GGGGGAAGCTACTGGTGAATATTAACCAAGGTCACCCATTTATCAGGGAGCAAACAGGAGCTAAGTCCAT |
| 1364 | 1375_Bushbaby_monoMut_T40G_n1 | GGGGGAAGCTACTGGTGAATATTAACCAAGGTCACCCAGGTATCAGGGAGCAAACAGGAGCTAAGTCCAT |
| 1365 | 1380_Bushbaby_monoMut_A42G_n1 | GGGGGAAGCTACTGGTGAATATTAACCAAGGTCACCCAGTIGTCAGGGAGCAAACAGGAGCTAAGTCCAT |
| 1366 | 1383_Bushbaby_monoMut_T43C_n1 | GGGGGAAGCTACTGGTGAATATTAACCAAGGTCACCCAGTTACCAGGGAGCAAACAGGAGCTAAGTCCAT |
| 1367 | 1384_Bushbaby_monoMut_T43G_n1 | GGGGGAAGCTACTGGTGAATATTAACCAAGGTCACCCAGTTAGCAGGGAGCAAACAGGAGCTAAGTCCAT |
| 1368 | 1390_Bushbaby_monoMut_A45T_n1 | GGGGGAAGCTACTGGTGAATATTAACCAAGGTCACCCAGTTATCTGGGAGCAAACAGGAGCTAAGTCCAT |
| 1369 | 1393_Bushbaby_monoMut_G46T_n1 | GGGGGAAGCTACTGGTGAATATTAACCAAGGTCACCCAGTTATCATGGAGCAAACAGGAGCTAAGTCCAT |
| 1370 | 1394_Bushbaby_monoMut_G47A_n1 | GGGGGAAGCTACTGGTGAATATTAACCAAGGTCACCCAGTTATCAGAGAGCAAACAGGAGCTAAGTCCAT |
| 1371 | 1396_Bushbaby_monoMut_G47T_n1 | GGGGGAAGCTACTGGTGAATATTAACCAAGGTCACCCAGTTATCAGTGAGCAAACAGGAGCTAAGTCCAT |
| 1372 | 1397_Bushbaby_monoMut_G48A_n1 | GGGGGAAGCTACTGGTGAATATTAACCAAGGTCACCCAGTTATCAGGAAGCAAACAGGAGCTAAGTCCAT |
| 1373 | 1402_Bushbaby_monoMut_A49T_n1 | GGGGGAAGCTACTGGTGAATATTAACCAAGGTCACCCAGTTATCAGGGTGCAAACAGGAGCTAAGTCCAT |
| 1374 | 1405_Bushbaby_monoMut_G50T_n1 | GGGGGAAGCTACTGGTGAATATTAACCAAGGICACCCAGTTATCAGGGATCAAACAGGAGCTAAGTCCAT |
| 1375 | 1411_Bushbaby_monoMut_A52T_n1 | GGGGGAAGCTACTGGTGAATATTAACCAAGGTCACCCAGTTATCAGGGAGCTAACAGGAGCTAAGTCCAT |
| 1376 | 1413_Bushbaby_monoMut_A53G_n1 | GGGGGAAGCTACTGGTGAATATTAACCAAGGTCACCCAGTTATCAGGGAGCAGACAGGAGCTAAGTCCAT |
| 1377 | 1424_Bushbaby_monoMut_G57A_n1 | GGGGGAAGCTACTGGTGAATATTAACCAAGGTCACCCAGTTATCAGGGAGCAAACAAGAGCTAAGTCCAT |
| 1378 | 1431_Bushbaby_monoMut_A59G_n1 | GGGGGAAGCTACTGGTGAATATTAACCAAGGTCACCCAGTTATCAGGGAGCAAACAGGGGCTAAGTCCAT |
| 1379 | 1432_Bushbaby_monoMut_A59T_n1 | GGGGGAAGCTACTGGTGAATATTAACCAAGGTCACCCAGTTATCAGGGAGCAAACAGGTGCTAAGTCCAT |
| 1380 | 1433_Bushbaby_monoMut_G60A_n1 | GGGGGAAGCTACTGGTGAATATTAACCAAGGTCACCCAGTTATCAGGGAGCAAACAGGAACTAAGTCCAT |
| 1381 | 1439_Bushbaby_monoMut_T62A_n1 | GGGGGAAGCTACTGGTGAATATTAACCAAGGTCACCCAGTTATCAGGGAGCAAACAGGAGCAAAGTCCAT |
| 1382 | 1441_Bushbaby_monoMut_T62G_n1 | GGGGGAAGCTACTGGTGAATATTAACCAAGGTCACCCAGTTATCAGGGAGCAAACAGGAGCGAAGTCCAT |
| 1383 | 1443_Bushbaby_monoMut_A63G_n1 | GGGGGAAGCTACTGGTGAATATTAACCAAGGTCACCCAGTTATCAGGGAGCAAACAGGAGCTGAGTCCAT |
| 1384 | 1457_Bushbaby_monoMut_C68A_n1 | GGGGGAAGCTACTGGTGAATATTAACCAAGGTCACCCAGTTATCAGGGAGCAAACAGGAGCTAAGTCAAT |
| 1385 | 1463_Bushbaby_monoMut_T70A_n1 | GGGGGAAGCTACTGGTGAATATTAACCAAGGTCACCCAGTTATCAGGGAGCAAACAGGAGCTAAGTCCAA |
| 1386 | 1464_Bushbaby_monoMut_T70C_n1 | GGGGGAAGCTACTGGTGAATATTAACCAAGGTCACCCAGTTATCAGGGAGCAAACAGGAGCTAAGTCCAC |
| 1387 | 1467_Bushbaby_diMut_GG1AC_n1 | ACGGGAAGCTACTGGTGAATATTAACCAAGGTCACCCAGTTATCAGGGAGCAAACAGGAGCTAAGTCCAT |
| 1388 | 1470_Bushbaby_diMut_GG1CC_n1 | CCGGGAAGCTACTGGTGAATATTAACCAAGGTCACCCAGTTATCAGGGAGCAAACAGGAGCTAAGTCCAT |
| 1389 | 1476_Bushbaby_diMut_GG2AC_n1 | GACGGAAGCTACTGGTGAATATTAACCAAGGTCACCCAGTTATCAGGGAGCAAACAGGAGCTAAGTCCAT |
| 1390 | 1478_Bushbaby_diMut_GG2CA_n1 | GCAGGAAGCTACTGGTGAATATTAACCAAGGTCACCCAGTTATCAGGGAGCAAACAGGAGCTAAGTCCAT |
| 1391 | 1479_Bushbaby_diMut_GG2CC_n1 | GCCGGAAGCTACTGGTGAATATTAACCAAGGTCACCCAGTTATCAGGGAGCAAACAGGAGCTAAGTCCAT |
| 1392 | 1482_Bushbaby_diMut_GG2TC_n1 | GTCGGAAGCTACTGGTGAATATTAACCAAGGTCACCCAGTTATCAGGGAGCAAACAGGAGCTAAGTCCAT |
| 1393 | 1484_Bushbaby_diMut_GG3AA_n1 | GGAAGAAGCTACTGGTGAATATTAACCAAGGTCACCCAGTTATCAGGGAGCAAACAGGAGCTAAGTCCAT |
| 1394 | 1495_Bushbaby_diMut_GG4AT_n1 | GGGATAAGCTACTGGTGAATATTAACCAAGGTCACCCAGTTATCAGGGAGCAAACAGGAGCTAAGTCCAT |
| 1395 | 1497_Bushbaby_diMut_GG4CC_n1 | GGGCCAAGCTACTGGTGAATATTAACCAAGGTCACCCAGTTATCAGGGAGCAAACAGGAGCTAAGTCCAT |
| 1396 | 1506_Bushbaby_diMut_GA5CG_n1 | GGGGCGAGCTACTGGTGAATATTAACCAAGGTCACCCAGTTATCAGGGAGCAAACAGGAGCTAAGTCCAT |
| 1397 | 1507_Bushbaby_diMut_GA5CT_n1 | GGGGCTAGCTACTGGTGAATATTAACCAAGGTCACCCAGTTATCAGGGAGCAAACAGGAGCTAAGTCCAT |
| 1398 | 1515_Bushbaby_diMut_AA6GG_n1 | GGGGGGGGCTACTGGTGAATATTAACCAAGGTCACCCAGTTATCAGGGAGCAAACAGGAGCTAAGTCCAT |
| 1399 | 1516_Bushbaby_diMut_AA6GT_n1 | GGGGGGTGCTACTGGTGAATATTAACCAAGGTCACCCAGTTATCAGGGAGCAAACAGGAGCTAAGTCCAT |
| 1400 | 1519_Bushbaby_diMut_AA6TT_n1 | GGGGGTTGCTACTGGTGAATATTAACCAAGGTCACCCAGTTATCAGGGAGCAAACAGGAGCTAAGTCCAT |
| 1401 | 1521_Bushbaby_diMut_AG7CC_n1 | GGGGGACCCTACTGGTGAATATTAACCAAGGTCACCCAGTTATCAGGGAGCAAACAGGAGCTAAGTCCAT |
| 1402 | 1523_Bushbaby_diMut_AG7GA_n1 | GGGGGAGACTACTGGTGAATATTAACCAAGGTCACCCAGTTATCAGGGAGCAAACAGGAGCTAAGTCCAT |
| 1403 | 1525_Bushbaby_diMut_AG7GT_n1 | GGGGGAGTCTACTGGTGAATATTAACCAAGGTCACCCAGTTATCAGGGAGCAAACAGGAGCTAAGTCCAT |
| 1404 | 1529_Bushbaby_diMut_GC8AA_n1 | GGGGGAAAATACTGGTGAATATTAACCAAGGTCACCCAGTTATCAGGGAGCAAACAGGAGCTAAGTCCAT |
| 1405 | 1531_Bushbaby_diMut_GC8AT_n1 | GGGGGAAATTACTGGTGAATATTAACCAAGGTCACCCAGTTATCAGGGAGCAAACAGGAGCTAAGTCCAT |
| 1406 | 1533_Bushbaby_diMut_GC8CG_n1 | GGGGGAACGTACTGGTGAATATTAACCAAGGTCACCCAGTTATCAGGGAGCAAACAGGAGCTAAGTCCAT |
| 1407 | 1535_Bushbaby_diMut_GC8TA_n1 | GGGGGAATATACTGGTGAATATTAACCAAGGTCACCCAGTTATCAGGGAGCAAACAGGAGCTAAGTCCAT |
| 1408 | 1536_Bushbaby_diMut_GC8TG_n1 | GGGGGAATGTACTGGTGAATATTAACCAAGGTCACCCAGTTATCAGGGAGCAAACAGGAGCTAAGTCCAT |
| 1409 | 1537_Bushbaby_diMut_GC8TT_n1 | GGGGGAATTTACTGGTGAATATTAACCAAGGTCACCCAGTTATCAGGGAGCAAACAGGAGCTAAGTCCAT |
| 1410 | 1539_Bushbaby_diMut_CT9AC_n1 | GGGGGAAGACACTGGTGAATATTAACCAAGGTCACCCAGTTATCAGGGAGCAAACAGGAGCTAAGTCCAT |
| 1411 | 1540_Bushbaby_diMut_CT9AG_n1 | GGGGGAAGAGACTGGTGAATATTAACCAAGGTCACCCAGTTATCAGGGAGCAAACAGGAGCTAAGTCCAT |
| 1412 | 1541_Bushbaby_diMut_CT9GA_n1 | GGGGGAAGGAACTGGTGAATATTAACCAAGGTCACCCAGTTATCAGGGAGCAAACAGGAGCTAAGTCCAT |
| 1413 | 1542_Bushbaby_diMut_CT9GC_n1 | GGGGGAAGGCACTGGTGAATATTAACCAAGGTCACCCAGTTATCAGGGAGCAAACAGGAGCTAAGTCCAT |
| 1414 | 1543_Bushbaby_diMut_CT9GG_n1 | GGGGGAAGGGACTGGTGAATATTAACCAAGGTCACCCAGTTATCAGGGAGCAAACAGGAGCTAAGTCCAT |
| 1415 | 1544_Bushbaby_diMut_CT9TA_n1 | GGGGGAAGTAACTGGTGAATATTAACCAAGGTCACCCAGTTATCAGGGAGCAAACAGGAGCTAAGTCCAT |
| 1416 | 1545_Bushbaby_diMut_CT9TC_n1 | GGGGGAAGTCACTGGTGAATATTAACCAAGGTCACCCAGTTATCAGGGAGCAAACAGGAGCTAAGTCCAT |
| 1417 | 1546_Bushbaby_diMut_CT9TG_n1 | GGGGGAAGTGACTGGTGAATATTAACCAAGGTCACCCAGTTATCAGGGAGCAAACAGGAGCTAAGTCCAT |
| 1418 | 1550_Bushbaby_diMut_TA10CC_n1 | GGGGGAAGCCCCTGGTGAATATTAACCAAGGTCACCCAGTTATCAGGGAGCAAACAGGAGCTAAGTCCAT |
| 1419 | 1551_Bushbaby_diMut_TA10CG_n1 | GGGGGAAGCCGCTGGTGAATATTAACCAAGGTCACCCAGTTATCAGGGAGCAAACAGGAGCTAAGTCCAT |
| 1420 | 1553_Bushbaby_diMut_TA10GC_n1 | GGGGGAAGCGCCTGGTGAATATTAACCAAGGTCACCCAGTTATCAGGGAGCAAACAGGAGCTAAGTCCAT |
| 1421 | 1555_Bushbaby_diMut_TA10GT_n1 | GGGGGAAGCGTCTGGTGAATATTAACCAAGGTCACCCAGTTATCAGGGAGCAAACAGGAGCTAAGTCCAT |
| 1422 | 1563_Bushbaby_diMut_AC11TG_n1 | GGGGGAAGCTTGTGGTGAATATTAACCAAGGTCACCCAGTTATCAGGGAGCAAACAGGAGCTAAGTCCAT |
| 1423 | 1564_Bushbaby_diMut_AC11TT_n1 | GGGGGAAGCTTTTGGTGAATATTAACCAAGGTCACCCAGTTATCAGGGAGCAAACAGGAGCTAAGTCCAT |
| 1424 | 1567_Bushbaby_diMut_CT12AG_n1 | GGGGGAAGCTAAGGGTGAATATTAACCAAGGTCACCCAGTTATCAGGGAGCAAACAGGAGCTAAGTCCAT |
| 1425 | 1573_Bushbaby_diMut_CT12TG_n1 | GGGGGAAGCTATGGGTGAATATTAACCAAGGTCACCCAGTTATCAGGGAGCAAACAGGAGCTAAGTCCAT |
| 1426 | 1574_Bushbaby_diMut_TG13AA_n1 | GGGGGAAGCTACAAGTGAATATTAACCAAGGTCACCCAGTTATCAGGGAGCAAACAGGAGCTAAGTCCAT |
| 1427 | 1585_Bushbaby_diMut_GG14AT_n1 | GGGGGAAGCTACTATTGAATATTAACCAAGGTCACCCAGTTATCAGGGAGCAAACAGGAGCTAAGTCCAT |
| 1428 | 1593_Bushbaby_diMut_GT15AC_n1 | GGGGGAAGCTACTGACGAATATTAACCAAGGTCACCCAGTTATCAGGGAGCAAACAGGAGCTAAGTCCAT |
| 1429 | 1598_Bushbaby_diMut_GT15TA_n1 | GGGGGAAGCTACTGTAGAATATTAACCAAGGTCACCCAGTTATCAGGGAGCAAACAGGAGCTAAGTCCAT |
| 1430 | 1600_Bushbaby_diMut_GT15TG_n1 | GGGGGAAGCTACTGTGGAATATTAACCAAGGTCACCCAGTTATCAGGGAGCAAACAGGAGCTAAGTCCAT |
| 1431 | 1601_Bushbaby_diMut_TG16AA_n1 | GGGGGAAGCTACTGGAAAATATTAACCAAGGTCACCCAGTTATCAGGGAGCAAACAGGAGCTAAGTCCAT |
| 1432 | 1617_Bushbaby_diMut_GA17TG_n1 | GGGGGAAGCTACTGGTTGATATTAACCAAGGTCACCCAGTTATCAGGGAGCAAACAGGAGCTAAGTCCAT |
| 1433 | 1622_Bushbaby_diMut_AA18GC_n1 | GGGGGAAGCTACTGGTGGCTATTAACCAAGGTCACCCAGTTATCAGGGAGCAAACAGGAGCTAAGTCCAT |
| 1434 | 1629_Bushbaby_diMut_AT19CC_n1 | GGGGGAAGCTACTGGTGACCATTAACCAAGGTCACCCAGTTATCAGGGAGCAAACAGGAGCTAAGTCCAT |
| 1435 | 1642_Bushbaby_diMut_TA20CT_n1 | GGGGGAAGCTACTGGTGAACTTTAACCAAGGTCACCCAGTTATCAGGGAGCAAACAGGAGCTAAGTCCAT |
| 1436 | 1645_Bushbaby_diMut_TA20GT_n1 | GGGGGAAGCTACTGGTGAAGTTTAACCAAGGTCACCCAGTTATCAGGGAGCAAACAGGAGCTAAGTCCAT |
| 1437 | 1647_Bushbaby_diMut_AT21CC_n1 | GGGGGAAGCTACTGGTGAATCCTAACCAAGGTCACCCAGTTATCAGGGAGCAAACAGGAGCTAAGTCCAT |
| 1438 | 1648_Bushbaby_diMut_AT21CG_n1 | GGGGGAAGCTACTGGTGAATCGTAACCAAGGTCACCCAGTTATCAGGGAGCAAACAGGAGCTAAGTCCAT |
| 1439 | 1652_Bushbaby_diMut_AT21TA_n1 | GGGGGAAGCTACTGGTGAATTATAACCAAGGTCACCCAGTTATCAGGGAGCAAACAGGAGCTAAGTCCAT |
| 1440 | 1653_Bushbaby_diMut_AT21TC_n1 | GGGGGAAGCTACTGGTGAATTCTAACCAAGGTCACCCAGTTATCAGGGAGCAAACAGGAGCTAAGTCCAT |
| 1441 | 1669_Bushbaby_diMut_TA23CT_n1 | GGGGGAAGCTACTGGTGAATATCTACCAAGGTCACCCAGTTATCAGGGAGCAAACAGGAGCTAAGTCCAT |
| 1442 | 1673_Bushbaby_diMut_AA24CC_n1 | GGGGGAAGCTACTGGTGAATATTCCCCAAGGTCACCCAGTTATCAGGGAGCAAACAGGAGCTAAGTCCAT |
| 1443 | 1681_Bushbaby_diMut_AA24TT_n1 | GGGGGAAGCTACTGGTGAATATTTTCCAAGGTCACCCAGTTATCAGGGAGCAAACAGGAGCTAAGTCCAT |
| 1444 | 1684_Bushbaby_diMut_AC25CT_n1 | GGGGGAAGCTACTGGTGAATATTACTCAAGGTCACCCAGTTATCAGGGAGCAAACAGGAGCTAAGTCCAT |
| 1445 | 1686_Bushbaby_diMut_AC25GG_n1 | GGGGGAAGCTACTGGTGAATATTAGGCAAGGTCACCCAGTTATCAGGGAGCAAACAGGAGCTAAGTCCAT |
| 1446 | 1690_Bushbaby_diMut_AC25TT_n1 | GGGGGAAGCTACTGGTGAATATTATTCAAGGTCACCCAGTTATCAGGGAGCAAACAGGAGCTAAGTCCAT |
| 1447 | 1716_Bushbaby_diMut_AA28TG_n1 | GGGGGAAGCTACTGGTGAATATTAACCTGGGTCACCCAGTTATCAGGGAGCAAACAGGAGCTAAGTCCAT |
| 1448 | 1727_Bushbaby_diMut_GG30AA_n1 | GGGGGAAGCTACTGGTGAATATTAACCAAAATCACCCAGTTATCAGGGAGCAAACAGGAGCTAAGTCCAT |
| 1449 | 1747_Bushbaby_diMut_TC32AT_n1 | GGGGGAAGCTACTGGTGAATATTAACCAAGGATACCCAGTTATCAGGGAGCAAACAGGAGCTAAGTCCAT |
| 1450 | 1758_Bushbaby_diMut_CA33GG_n1 | GGGGGAAGCTACTGGTGAATATTAACCAAGGTGGCCCAGTTATCAGGGAGCAAACAGGAGCTAAGTCCAT |
| 1451 | 1761_Bushbaby_diMut_CA33TG_n1 | GGGGGAAGCTACTGGTGAATATTAACCAAGGTTGCCCAGTTATCAGGGAGCAAACAGGAGCTAAGTCCAT |
| 1452 | 1768_Bushbaby_diMut_AC34GT_n1 | GGGGGAAGCTACTGGTGAATATTAACCAAGGTCGTCCAGTTATCAGGGAGCAAACAGGAGCTAAGTCCAT |
| 1453 | 1772_Bushbaby_diMut_CC35AA_n1 | GGGGGAAGCTACTGGTGAATATTAACCAAGGTCAAACAGTTATCAGGGAGCAAACAGGAGCTAAGTCCAT |
| 1454 | 1780_Bushbaby_diMut_CC35TT_n1 | GGGGGAAGCTACTGGTGAATATTAACCAAGGTCATTCAGTTATCAGGGAGCAAACAGGAGCTAAGTCCAT |
| 1455 | 1785_Bushbaby_diMut_CC36GG_n1 | GGGGGAAGCTACTGGTGAATATTAACCAAGGTCACGGAGTTATCAGGGAGCAAACAGGAGCTAAGTCCAT |
| 1456 | 1786_Bushbaby_diMut_CC36GT_n1 | GGGGGAAGCTACTGGTGAATATTAACCAAGGTCACGTAGTTATCAGGGAGCAAACAGGAGCTAAGTCCAT |
| 1457 | 1787_Bushbaby_diMut_CC36TA_n1 | GGGGGAAGCTACTGGTGAATATTAACCAAGGTCACTAAGTTATCAGGGAGCAAACAGGAGCTAAGTCCAT |
| 1458 | 1792_Bushbaby_diMut_CA37AT_n1 | GGGGGAAGCTACTGGTGAATATTAACCAAGGTCACCATGTTATCAGGGAGCAAACAGGAGCTAAGTCCAT |
| 1459 | 1798_Bushbaby_diMut_CA37TT_n1 | GGGGGAAGCTACTGGTGAATATTAACCAAGGTCACCTTGTTATCAGGGAGCAAACAGGAGCTAAGTCCAT |
| 1460 | 1800_Bushbaby_diMut_AG38CC_n1 | GGGGGAAGCTACTGGTGAATATTAACCAAGGTCACCCCCTTATCAGGGAGCAAACAGGAGCTAAGTCCAT |
| 1461 | 1802_Bushbaby_diMut_AG38GA_n1 | GGGGGAAGCTACTGGTGAATATTAACCAAGGTCACCCGATTATCAGGGAGCAAACAGGAGCTAAGTCCAT |
| 1462 | 1807_Bushbaby_diMut_AG38TT_n1 | GGGGGAAGCTACTGGTGAATATTAACCAAGGTCACCCTTTTATCAGGGAGCAAACAGGAGCTAAGTCCAT |
| 1463 | 1809_Bushbaby_diMut_GT39AC_n1 | GGGGGAAGCTACTGGTGAATATTAACCAAGGTCACCCAACTATCAGGGAGCAAACAGGAGCTAAGTCCAT |
| 1464 | 1810_Bushbaby_diMut_GT39AG_n1 | GGGGGAAGCTACTGGTGAATATTAACCAAGGTCACCCAAGTATCAGGGAGCAAACAGGAGCTAAGTCCAT |
| 1465 | 1813_Bushbaby_diMut_GT39CG_n1 | GGGGGAAGCTACTGGTGAATATTAACCAAGGTCACCCACGTATCAGGGAGCAAACAGGAGCTAAGTCCAT |
| 1466 | 1816_Bushbaby_diMut_GT39TG_n1 | GGGGGAAGCTACTGGTGAATATTAACCAAGGTCACCCATGTATCAGGGAGCAAACAGGAGCTAAGTCCAT |
| 1467 | 1818_Bushbaby_diMut_TT40AC_n1 | GGGGGAAGCTACTGGTGAATATTAACCAAGGTCACCCAGACATCAGGGAGCAAACAGGAGCTAAGTCCAT |
| 1468 | 1822_Bushbaby_diMut_TT40CG_n1 | GGGGGAAGCTACTGGTGAATATTAACCAAGGTCACCCAGCGATCAGGGAGCAAACAGGAGCTAAGTCCAT |
| 1469 | 1833_Bushbaby_diMut_TA41GG_n1 | GGGGGAAGCTACTGGTGAATATTAACCAAGGTCACCCAGTGGTCAGGGAGCAAACAGGAGCTAAGTCCAT |
| 1470 | 1835_Bushbaby_diMut_AT42CA_n1 | GGGGGAAGCTACTGGTGAATATTAACCAAGGTCACCCAGTTCACAGGGAGCAAACAGGAGCTAAGTCCAT |
| 1471 | 1837_Bushbaby_diMut_AT42CG_n1 | GGGGGAAGCTACTGGTGAATATTAACCAAGGTCACCCAGTTCGCAGGGAGCAAACAGGAGCTAAGTCCAT |
| 1472 | 1839_Bushbaby_diMut_AT42GC_n1 | GGGGGAAGCTACTGGTGAATATTAACCAAGGTCACCCAGTTGCCAGGGAGCAAACAGGAGCTAAGTCCAT |
| 1473 | 1849_Bushbaby_diMut_TC43CT_n1 | GGGGGAAGCTACTGGTGAATATTAACCAAGGTCACCCAGTTACTAGGGAGCAAACAGGAGCTAAGTCCAT |
| 1474 | 1851_Bushbaby_diMut_TC43GG_n1 | GGGGGAAGCTACTGGTGAATATTAACCAAGGTCACCCAGTTAGGAGGGAGCAAACAGGAGCTAAGTCCAT |
| 1475 | 1856_Bushbaby_diMut_CA44GC_n1 | GGGGGAAGCTACTGGTGAATATTAACCAAGGTCACCCAGTTATGCGGGAGCAAACAGGAGCTAAGTCCAT |
| 1476 | 1871_Bushbaby_diMut_GG46AA_n1 | GGGGGAAGCTACTGGTGAATATTAACCAAGGTCACCCAGTTATCAAAGAGCAAACAGGAGCTAAGTCCAT |
| 1477 | 1873_Bushbaby_diMut_GG46AT_n1 | GGGGGAAGCTACTGGTGAATATTAACCAAGGTCACCCAGTTATCAATGAGCAAACAGGAGCTAAGTCCAT |
| 1478 | 1874_Bushbaby_diMut_GG46CA_n1 | GGGGGAAGCTACTGGTGAATATTAACCAAGGTCACCCAGTTATCACAGAGCAAACAGGAGCTAAGTCCAT |
| 1479 | 1875_Bushbaby_diMut_GG46CC_n1 | GGGGGAAGCTACTGGTGAATATTAACCAAGGTCACCCAGTTATCACCGAGCAAACAGGAGCTAAGTCCAT |
| 1480 | 1877_Bushbaby_diMut_GG46TA_n1 | GGGGGAAGCTACTGGTGAATATTAACCAAGGTCACCCAGTTATCATAGAGCAAACAGGAGCTAAGTCCAT |
| 1481 | 1879_Bushbaby_diMut_GG46TT_n1 | GGGGGAAGCTACTGGTGAATATTAACCAAGGTCACCCAGTTATCATTGAGCAAACAGGAGCTAAGTCCAT |
| 1482 | 1880_Bushbaby_diMut_GG47AA_n1 | GGGGGAAGCTACTGGTGAATATTAACCAAGGTCACCCAGTTATCAGAAAGCAAACAGGAGCTAAGTCCAT |
| 1483 | 1881_Bushbaby_diMut_GG47AC_n1 | GGGGGAAGCTACTGGTGAATATTAACCAAGGTCACCCAGTTATCAGACAGCAAACAGGAGCTAAGTCCAT |
| 1484 | 1882_Bushbaby_diMut_GG47AT_n1 | GGGGGAAGCTACTGGTGAATATTAACCAAGGTCACCCAGTTATCAGATAGCAAACAGGAGCTAAGTCCAT |
| 1485 | 1883_Bushbaby_diMut_GG47CA_n1 | GGGGGAAGCTACTGGTGAATATTAACCAAGGTCACCCAGTTATCAGCAAGCAAACAGGAGCTAAGTCCAT |
| 1486 | 1884_Bushbaby_diMut_GG47CC_n1 | GGGGGAAGCTACTGGTGAATATTAACCAAGGTCACCCAGTTATCAGCCAGCAAACAGGAGCTAAGTCCAT |
| 1487 | 1888_Bushbaby_diMut_GG47TT_n1 | GGGGGAAGCTACTGGTGAATATTAACCAAGGTCACCCAGTTATCAGTTAGCAAACAGGAGCTAAGTCCAT |
| 1488 | 1890_Bushbaby_diMut_GA48AG_n1 | GGGGGAAGCTACTGGTGAATATTAACCAAGGTCACCCAGTTATCAGGAGGCAAACAGGAGCTAAGTCCAT |
| 1489 | 1909_Bushbaby_diMut_GC50AT_n1 | GGGGGAAGCTACTGGTGAATATTAACCAAGGTCACCCAGTTATCAGGGAATAAACAGGAGCTAAGTCCAT |
| 1490 | 1918_Bushbaby_diMut_CA51AT_n1 | GGGGGAAGCTACTGGTGAATATTAACCAAGGTCACCCAGTTATCAGGGAGATAACAGGAGCTAAGTCCAT |
| 1491 | 1953_Bushbaby_diMut_CA55AG_n1 | GGGGGAAGCTACTGGTGAATATTAACCAAGGTCACCCAGTTATCAGGGAGCAAAAGGGAGCTAAGTCCAT |
| 1492 | 1959_Bushbaby_diMut_CA55TG_n1 | GGGGGAAGCTACTGGTGAATATTAACCAAGGTCACCCAGTTATCAGGGAGCAAATGGGAGCTAAGTCCAT |
| 1493 | 1988_Bushbaby_diMut_AG59CA_n1 | GGGGGAAGCTACTGGTGAATATTAACCAAGGTCACCCAGTTATCAGGGAGCAAACAGGCACTAAGTCCAT |
| 1494 | 1992_Bushbaby_diMut_AG59GC_n1 | GGGGGAAGCTACTGGTGAATATTAACCAAGGTCACCCAGTTATCAGGGAGCAAACAGGGCCTAAGTCCAT |
| 1495 | 1993_Bushbaby_diMut_AG59GT_n1 | GGGGGAAGCTACTGGTGAATATTAACCAAGGTCACCCAGTTATCAGGGAGCAAACAGGGTCTAAGTCCAT |
| 1496 | 1994_Bushbaby_diMut_AG59TA_n1 | GGGGGAAGCTACTGGTGAATATTAACCAAGGTCACCCAGTTATCAGGGAGCAAACAGGTACTAAGTCCAT |
| 1497 | 1995_Bushbaby_diMut_AG59TC_n1 | GGGGGAAGCTACTGGTGAATATTAACCAAGGTCACCCAGTTATCAGGGAGCAAACAGGTCCTAAGTCCAT |
| 1498 | 2004_Bushbaby_diMut_GC60TG_n1 | GGGGGAAGCTACTGGTGAATATTAACCAAGGTCACCCAGTTATCAGGGAGCAAACAGGATGTAAGTCCAT |
| 1499 | 2012_Bushbaby_diMut_CT61TA_n1 | GGGGGAAGCTACTGGTGAATATTAACCAAGGTCACCCAGTTATCAGGGAGCAAACAGGAGTAAAGTCCAT |
| 1500 | 2016_Bushbaby_diMut_TA62AG_n1 | GGGGGAAGCTACTGGTGAATATTAACCAAGGTCACCCAGTTATCAGGGAGCAAACAGGAGCAGAGTCCAT |
| 1501 | 2017_Bushbaby_diMut_TA62AT_n1 | GGGGGAAGCTACTGGTGAATATTAACCAAGGTCACCCAGTTATCAGGGAGCAAACAGGAGCATAGTCCAT |
| 1502 | 2022_Bushbaby_diMut_TA62GG_n1 | GGGGGAAGCTACTGGTGAATATTAACCAAGGTCACCCAGTTATCAGGGAGCAAACAGGAGCGGAGTCCAT |
| 1503 | 2053_Bushbaby_diMut_TC66AT_n1 | GGGGGAAGCTACTGGTGAATATTAACCAAGGTCACCCAGTTATCAGGGAGCAAACAGGAGCTAAGATCAT |
| 1504 | 2056_Bushbaby_diMut_TC66CT_n1 | GGGGGAAGCTACTGGTGAATATTAACCAAGGTCACCCAGTTATCAGGGAGCAAACAGGAGCTAAGCTCAT |
| 1505 | 2059_Bushbaby_diMut_TC66GT_n1 | GGGGGAAGCTACTGGTGAATATTAACCAAGGTCACCCAGTTATCAGGGAGCAAACAGGAGCTAAGGTCAT |
| 1506 | 2060_Bushbaby_diMut_CC67AA_n1 | GGGGGAAGCTACTGGTGAATATTAACCAAGGTCACCCAGTTATCAGGGAGCAAACAGGAGCTAAGTAAAT |

CTAAG -> CAAAG single nucleotide substitution variant had the highest expression.

TABLE 13
Single and adjacent di-nucleotide substitution variants of human SERPINA1 enhancer with HNF4 and FOXA transcription factor consensus sites
with higher luciferase expression than original sequence SEQ ID NO: 85

| SEQ ID NO: | HNF4_FOXA SERPINA1 enhancer variant | Sequence |
|---|---|---|
| 1507 | 3310_HNF4_FOXA_monoMut_G2C_n1 | GCGGGAGGCTGCTGGTAAACATTAACCAAGGTCACCCCAGTTATCAGAGGAGCAAACAGGGGCAAAGTCCAC |
| 1508 | 3312_HNF4_FOXA_monoMut_G3A_n1 | GGAGGAGGCTGCTGGTAAACATTAACCAAGGTCACCCCAGTTATCAGAGGAGCAAACAGGGGCAAAGTCCAC |
| 1509 | 3315_HNF4_FOXA_monoMut_G4A_n1 | GGGAGAGGCTGCTGGTAAACATTAACCAAGGTCACCCCAGTTATCAGAGGAGCAAACAGGGGCAAAGTCCAC |
| 1510 | 3316_HNF4_FOXA_monoMut_G4C_n1 | GGGCGAGGCTGCTGGTAAACATTAACCAAGGTCACCCCAGTTATCAGAGGAGCAAACAGGGGCAAAGTCCAC |
| 1511 | 3333_HNF4_FOXA_monoMut_T10A_n1 | GGGGGAGGCAGCTGGTAAACATTAACCAAGGTCACCCCAGTTATCAGAGGAGCAAACAGGGGCAAAGTCCAC |
| 1512 | 3334_HNF4_FOXA_monoMut_T10C_n1 | GGGGGAGGCCGCTGGTAAACATTAACCAAGGTCACCCCAGTTATCAGAGGAGCAAACAGGGGCAAAGTCCAC |
| 1513 | 3341_HNF4_FOXA_monoMut_C12T_n1 | GGGGGAGGCTGTTGGTAAACATTAACCAAGGTCACCCCAGTTATCAGAGGAGCAAACAGGGGCAAAGTCCAC |
| 1514 | 3342_HNF4_FOXA_monoMut_T13A_n1 | GGGGGAGGCTGCAGGTAAACATTAACCAAGGTCACCCCAGTTATCAGAGGAGCAAACAGGGGCAAAGTCCAC |
| 1515 | 3343_HNF4_FOXA_monoMut_T13C_n1 | GGGGGAGGCTGCCGGTAAACATTAACCAAGGTCACCCCAGTTATCAGAGGAGCAAACAGGGGCAAAGTCCAC |
| 1516 | 3345_HNF4_FOXA_monoMut_G14A_n1 | GGGGGAGGCTGCTAGTAAACATTAACCAAGGTCACCCCAGTTATCAGAGGAGCAAACAGGGGCAAAGTCCAC |
| 1517 | 3362_HNF4_FOXA_monoMut_A19T_n1 | GGGGGAGGCTGCTGGTAATCATTAACCAAGGTCACCCCAGTTATCAGAGGAGCAAACAGGGGCAAAGTCCAC |
| 1518 | 3369_HNF4_FOXA_monoMut_T22A_n1 | GGGGGAGGCTGCTGGTAAACAATAACCAAGGTCACCCCAGTTATCAGAGGAGCAAACAGGGGCAAAGTCCAC |
| 1519 | 3373_HNF4_FOXA_monoMut_T23C_n1 | GGGGGAGGCTGCTGGTAAACATCAACCAAGGTCACCCCAGTTATCAGAGGAGCAAACAGGGGCAAAGTCCAC |
| 1520 | 3375_HNF4_FOXA_monoMut_A24C_n1 | GGGGGAGGCTGCTGGTAAACATTCACCAAGGTCACCCCAGTTATCAGAGGAGCAAACAGGGGCAAAGTCCAC |
| 1521 | 3376_HNF4_FOXA_monoMut_A24G_n1 | GGGGGAGGCTGCTGGTAAACATTGACCAAGGTCACCCCAGTTATCAGAGGAGCAAACAGGGGCAAAGTCCAC |
| 1522 | 3379_HNF4_FOXA_monoMut_A25G_n1 | GGGGGAGGCTGCTGGTAAACATTAGCCAAGGTCACCCCAGTTATCAGAGGAGCAAACAGGGGCAAAGTCCAC |
| 1523 | 3383_HNF4_FOXA_monoMut_C26T_n1 | GGGGGAGGCTGCTGGTAAACATTAATCAAGGTCACCCCAGTTATCAGAGGAGCAAACAGGGGCAAAGTCCAC |
| 1524 | 3386_HNF4_FOXA_monoMut_C27T_n1 | GGGGGAGGCTGCTGGTAAACATTAACTAAGGTCACCCCAGTTATCAGAGGAGCAAACAGGGGCAAAGTCCAC |
| 1525 | 3408_HNF4_FOXA_monoMut_C35A_n1 | GGGGGAGGCTGCTGGTAAACATTAACCAAGGTCAACCCAGTTATCAGAGGAGCAAACAGGGGCAAAGTCCAC |
| 1526 | 3409_HNF4_FOXA_monoMut_C35G_n1 | GGGGGAGGCTGCTGGTAAACATTAACCAAGGTCAGCCCAGTTATCAGAGGAGCAAACAGGGGCAAAGTCCAC |
| 1527 | 3410_HNF4_FOXA_monoMut_C35T_n1 | GGGGGAGGCTGCTGGTAAACATTAACCAAGGTCATCCCAGTTATCAGAGGAGCAAACAGGGGCAAAGTCCAC |
| 1528 | 3413_HNF4_FOXA_monoMut_C36T_n1 | GGGGGAGGCTGCTGGTAAACATTAACCAAGGTCACTCCAGTTATCAGAGGAGCAAACAGGGGCAAAGTCCAC |
| 1529 | 3415_HNF4_FOXA_monoMut_C37G_n1 | GGGGGAGGCTGCTGGTAAACATTAACCAAGGTCACCGCAGTTATCAGAGGAGCAAACAGGGGCAAAGTCCAC |
| 1530 | 3416_HNF4_FOXA_monoMut_C37T_n1 | GGGGGAGGCTGCTGGTAAACATTAACCAAGGTCACCTCAGTTATCAGAGGAGCAAACAGGGGCAAAGTCCAC |
| 1531 | 3418_HNF4_FOXA_monoMut_C38G_n1 | GGGGGAGGCTGCTGGTAAACATTAACCAAGGTCACCCGAGTTATCAGAGGAGCAAACAGGGGCAAAGTCCAC |
| 1532 | 3420_HNF4_FOXA_monoMut_A39C_n1 | GGGGGAGGCTGCTGGTAAACATTAACCAAGGTCACCCCCGTTATCAGAGGAGCAAACAGGGGCAAAGTCCAC |
| 1533 | 3421_HNF4_FOXA_monoMut_A39G_n1 | GGGGGAGGCTGCTGGTAAACATTAACCAAGGTCACCCCGGTTATCAGAGGAGCAAACAGGGGCAAAGTCCAC |
| 1534 | 3422_HNF4_FOXA_monoMut_A39T_n1 | GGGGGAGGCTGCTGGTAAACATTAACCAAGGTCACCCCTGTTATCAGAGGAGCAAACAGGGGCAAAGTCCAC |
| 1535 | 3423_HNF4_FOXA_monoMut_G40A_n1 | GGGGGAGGCTGCTGGTAAACATTAACCAAGGTCACCCCAATTATCAGAGGAGCAAACAGGGGCAAAGTCCAC |
| 1536 | 3427_HNF4_FOXA_monoMut_T41C_n1 | GGGGGAGGCTGCTGGTAAACATTAACCAAGGTCACCCCAGCTATCAGAGGAGCAAACAGGGGCAAAGTCCAC |
| 1537 | 3440_HNF4_FOXA_monoMut_C45T_n1 | GGGGGAGGCTGCTGGTAAACATTAACCAAGGTCACCCCAGTTATTAGAGGAGCAAACAGGGGCAAAGTCCAC |
| 1538 | 3445_HNF4_FOXA_monoMut_G47C_n1 | GGGGGAGGCTGCTGGTAAACATTAACCAAGGTCACCCCAGTTATCACAGGAGCAAACAGGGGCAAAGTCCAC |
| 1539 | 3446_HNF4_FOXA_monoMut_G47T_n1 | GGGGGAGGCTGCTGGTAAACATTAACCAAGGTCACCCCAGTTATCATAGGAGCAAACAGGGGCAAAGTCCAC |
| 1540 | 3447_HNF4_FOXA_monoMut_A48C_n1 | GGGGGAGGCTGCTGGTAAACATTAACCAAGGTCACCCCAGTTATCAGCGGAGCAAACAGGGGCAAAGTCCAC |
| 1541 | 3453_HNF4_FOXA_monoMut_G50A_n1 | GGGGGAGGCTGCTGGTAAACATTAACCAAGGTCACCCCAGTTATCAGAGAAGCAAACAGGGGCAAAGTCCAC |
| 1542 | 3456_HNF4_FOXA_monoMut_A51C_n1 | GGGGGAGGCTGCTGGTAAACATTAACCAAGGTCACCCCAGTTATCAGAGGCGCAAACAGGGGCAAAGTCCAC |
| 1543 | 3459_HNF4_FOXA_monoMut_G52A_n1 | GGGGGAGGCTGCTGGTAAACATTAACCAAGGTCACCCCAGTTATCAGAGGAACAAACAGGGGCAAAGTCCAC |
| 1544 | 3460_HNF4_FOXA_monoMut_G52C_n1 | GGGGGAGGCTGCTGGTAAACATTAACCAAGGTCACCCCAGTTATCAGAGGACCAAACAGGGGCAAAGTCCAC |
| 1545 | 3461_HNF4_FOXA_monoMut_G52T_n1 | GGGGGAGGCTGCTGGTAAACATTAACCAAGGTCACCCCAGTTATCAGAGGATCAAACAGGGGCAAAGTCCAC |
| 1546 | 3464_HNF4_FOXA_monoMut_C53T_n1 | GGGGGAGGCTGCTGGTAAACATTAACCAAGGTCACCCCAGTTATCAGAGGAGTAAACAGGGGCAAAGTCCAC |
| 1547 | 3467_HNF4_FOXA_monoMut_A54T_n1 | GGGGGAGGCTGCTGGTAAACATTAACCAAGGTCACCCCAGTTATCAGAGGAGCTAACAGGGGCAAAGTCCAC |
| 1548 | 3478_HNF4_FOXA_monoMut_A58G_n1 | GGGGGAGGCTGCTGGTAAACATTAACCAAGGTCACCCCAGTTATCAGAGGAGCAAACGGGGGCAAAGTCCAC |
| 1549 | 3488_HNF4_FOXA_monoMut_G61T_n1 | GGGGGAGGCTGCTGGTAAACATTAACCAAGGTCACCCCAGTTATCAGAGGAGCAAACAGGTGCAAAGTCCAC |
| 1550 | 3512_HNF4_FOXA_monoMut_C69T_n1 | GGGGGAGGCTGCTGGTAAACATTAACCAAGGTCACCCCAGTTATCAGAGGAGCAAACAGGGGCAAAGTTCAC |
| 1551 | 3519_HNF4_FOXA_monoMut_C72A_n1 | GGGGGAGGCTGCTGGTAAACATTAACCAAGGTCACCCCAGTTATCAGAGGAGCAAACAGGGGCAAAGTCCAA |
| 1552 | 3521_HNF4_FOXA_monoMut_C72T_n1 | GGGGGAGGCTGCTGGTAAACATTAACCAAGGTCACCCCAGTTATCAGAGGAGCAAACAGGGGCAAAGTCCAT |
| 1553 | 3523_HNF4_FOXA_diMut_GG1AC_n1 | ACGGGAGGCTGCTGGTAAACATTAACCAAGGTCACCCCAGTTATCAGAGGAGCAAACAGGGGCAAAGTCCAC |
| 1554 | 3526_HNF4_FOXA_diMut_GG1CC_n1 | CCGGGAGGCTGCTGGTAAACATTAACCAAGGTCACCCCAGTTATCAGAGGAGCAAACAGGGGCAAAGTCCAC |
| 1555 | 3532_HNF4_FOXA_diMut_GG2AC_n1 | GACGGAGGCTGCTGGTAAACATTAACCAAGGTCACCCCAGTTATCAGAGGAGCAAACAGGGGCAAAGTCCAC |
| 1556 | 3535_HNF4_FOXA_diMut_GG2CC_n1 | GCCGGAGGCTGCTGGTAAACATTAACCAAGGTCACCCCAGTTATCAGAGGAGCAAACAGGGGCAAAGTCCAC |
| 1557 | 3539_HNF4_FOXA_diMut_GG2TT_n1 | GTTGGAGGCTGCTGGTAAACATTAACCAAGGTCACCCCAGTTATCAGAGGAGCAAACAGGGGCAAAGTCCAC |
| 1558 | 3540_HNF4_FOXA_diMut_GG3AA_n1 | GGAAGAGGCTGCTGGTAAACATTAACCAAGGTCACCCCAGTTATCAGAGGAGCAAACAGGGGCAAAGTCCAC |
| 1559 | 3542_HNF4_FOXA_diMut_GG3AT_n1 | GGATGAGGCTGCTGGTAAACATTAACCAAGGTCACCCCAGTTATCAGAGGAGCAAACAGGGGCAAAGTCCAC |
| 1560 | 3545_HNF4_FOXA_diMut_GG3CT_n1 | GGCTGAGGCTGCTGGTAAACATTAACCAAGGTCACCCCAGTTATCAGAGGAGCAAACAGGGGCAAAGTCCAC |
| 1561 | 3546_HNF4_FOXA_diMut_GG3TA_n1 | GGTAGAGGCTGCTGGTAAACATTAACCAAGGTCACCCCAGTTATCAGAGGAGCAAACAGGGGCAAAGTCCAC |
| 1562 | 3550_HNF4_FOXA_diMut_GG4AC_n1 | GGGACAGGCTGCTGGTAAACATTAACCAAGGTCACCCCAGTTATCAGAGGAGCAAACAGGGGCAAAGTCCAC |
| 1563 | 3552_HNF4_FOXA_diMut_GG4CA_n1 | GGGCAAGGCTGCTGGTAAACATTAACCAAGGTCACCCCAGTTATCAGAGGAGCAAACAGGGGCAAAGTCCAC |
| 1564 | 3560_HNF4_FOXA_diMut_GA5AT_n1 | GGGGATGGCTGCTGGTAAACATTAACCAAGGTCACCCCAGTTATCAGAGGAGCAAACAGGGGCAAAGTCCAC |
| 1565 | 3561_HNF4_FOXA_diMut_GA5CC_n1 | GGGGCCGGCTGCTGGTAAACATTAACCAAGGTCACCCCAGTTATCAGAGGAGCAAACAGGGGCAAAGTCCAC |
| 1566 | 3562_HNF4_FOXA_diMut_GA5CG_n1 | GGGGGGGGCTGCTGGTAAACATTAACCAAGGTCACCCCAGTTATCAGAGGAGCAAACAGGGGCAAAGTCCAC |
| 1567 | 3568_HNF4_FOXA_diMut_AG6CC_n1 | GGGGGCCGCTGCTGGTAAACATTAACCAAGGTCACCCCAGTTATCAGAGGAGCAAACAGGGGCAAAGTCCAC |
| 1568 | 3575_HNF4_FOXA_diMut_AG6TT_n1 | GGGGGTTGCTGCTGGTAAACATTAACCAAGGTCACCCCAGTTATCAGAGGAGCAAACAGGGGCAAAGTCCAC |
| 1569 | 3577_HNF4_FOXA_diMut_GG7AC_n1 | GGGGGAACCTGCTGGTAAACATTAACCAAGGTCACCCCAGTTATCAGAGGAGCAAACAGGGGCAAAGTCCAC |
| 1570 | 3584_HNF4_FOXA_diMut_GG7TT_n1 | GGGGGATTCTGCTGGTAAACATTAACCAAGGTCACCCCAGTTATCAGAGGAGCAAACAGGGGCAAAGTCCAC |
| 1571 | 3585_HNF4_FOXA_diMut_GC8AA_n1 | GGGGGAGAATGCTGGTAAACATTAACCAAGGTCACCCCAGTTATCAGAGGAGCAAACAGGGGCAAAGTCCAC |
| 1572 | 3588_HNF4_FOXA_diMut_GC8CA_n1 | GGGGGAGCATGCTGGTAAACATTAACCAAGGTCACCCCAGTTATCAGAGGAGCAAACAGGGGCAAAGTCCAC |
| 1573 | 3589_HNF4_FOXA_diMut_GC8CG_n1 | GGGGGAGCGTGCTGGTAAACATTAACCAAGGTCACCCCAGTTATCAGAGGAGCAAACAGGGGCAAAGTCCAC |
| 1574 | 3591_HNF4_FOXA_diMut_GC8TA_n1 | GGGGGAGTATGCTGGTAAACATTAACCAAGGTCACCCCAGTTATCAGAGGAGCAAACAGGGGCAAAGTCCAC |
| 1575 | 3595_HNF4_FOXA_diMut_CT9AC_n1 | GGGGGAGGACGCTGGTAAACATTAACCAAGGTCACCCCAGTTATCAGAGGAGCAAACAGGGGCAAAGTCCAC |
| 1576 | 3598_HNF4_FOXA_diMut_CT9GC_n1 | GGGGGAGGGCGCTGGTAAACATTAACCAAGGTCACCCCAGTTATCAGAGGAGCAAACAGGGGCAAAGTCCAC |
| 1577 | 3600_HNF4_FOXA_diMut_CT9TA_n1 | GGGGGAGGTAGCTGGTAAACATTAACCAAGGTCACCCCAGTTATCAGAGGAGCAAACAGGGGCAAAGTCCAC |
| 1578 | 3601_HNF4_FOXA_diMut_CT9TC_n1 | GGGGGAGGTCGCTGGTAAACATTAACCAAGGTCACCCCAGTTATCAGAGGAGCAAACAGGGGCAAAGTCCAC |
| 1579 | 3602_HNF4_FOXA_diMut_CT9TG_n1 | GGGGGAGGTGGCTGGTAAACATTAACCAAGGTCACCCCAGTTATCAGAGGAGCAAACAGGGGCAAAGTCCAC |
| 1580 | 3605_HNF4_FOXA_diMut_TG10AT_n1 | GGGGGAGGCATCTGGTAAACATTAACCAAGGTCACCCCAGTTATCAGAGGAGCAAACAGGGGCAAAGTCCAC |
| 1581 | 3608_HNF4_FOXA_diMut_TG10CT_n1 | GGGGGAGGCCTCTGGTAAACATTAACCAAGGTCACCCCAGTTATCAGAGGAGCAAACAGGGGCAAAGTCCAC |
| 1582 | 3609_HNF4_FOXA_diMut_TG10GA_n1 | GGGGGAGGCGACTGGTAAACATTAACCAAGGTCACCCCAGTTATCAGAGGAGCAAACAGGGGCAAAGTCCAC |
| 1583 | 3613_HNF4_FOXA_diMut_GC11AG_n1 | GGGGGAGGCTAGTGGTAAACATTAACCAAGGTCACCCCAGTTATCAGAGGAGCAAACAGGGGCAAAGTCCAC |
| 1584 | 3615_HNF4_FOXA_diMut_GC11CA_n1 | GGGGGAGGCTCATGGTAAACATTAACCAAGGTCACCCCAGTTATCAGAGGAGCAAACAGGGGCAAAGTCCAC |
| 1585 | 3618_HNF4_FOXA_diMut_GC11TA_n1 | GGGGGAGGCTTATGGTAAACATTAACCAAGGTCACCCCAGTTATCAGAGGAGCAAACAGGGGCAAAGTCCAC |
| 1586 | 3621_HNF4_FOXA_diMut_CT12AA_n1 | GGGGGAGGCTGAAGGTAAACATTAACCAAGGTCACCCCAGTTATCAGAGGAGCAAACAGGGGCAAAGTCCAC |
| 1587 | 3622_HNF4_FOXA_diMut_CT12AC_n1 | GGGGGAGGCTGACGGTAAACATTAACCAAGGTCACCCCAGTTATCAGAGGAGCAAACAGGGGCAAAGTCCAC |
| 1588 | 3624_HNF4_FOXA_diMut_CT12GA_n1 | GGGGGAGGCTGGAGGTAAACATTAACCAAGGTCACCCCAGTTATCAGAGGAGCAAACAGGGGCAAAGTCCAC |
| 1589 | 3625_HNF4_FOXA_diMut_CT12GC_n1 | GGGGGAGGCTGGCGGTAAACATTAACCAAGGTCACCCCAGTTATCAGAGGAGCAAACAGGGGCAAAGTCCAC |
| 1590 | 3626_HNF4_FOXA_diMut_CT12GG_n1 | GGGGGAGGCTGGGGGTAAACATTAACCAAGGTCACCCCAGTTATCAGAGGAGCAAACAGGGGCAAAGTCCAC |
| 1591 | 3627_HNF4_FOXA_diMut_CT12TA_n1 | GGGGGAGGCTGTAGGTAAACATTAACCAAGGTCACCCCAGTTATCAGAGGAGCAAACAGGGGCAAAGTCCAC |
| 1592 | 3630_HNF4_FOXA_diMut_TG13AA_n1 | GGGGGAGGCTGCAAGTAAACATTAACCAAGGTCACCCCAGTTATCAGAGGAGCAAACAGGGGCAAAGTCCAC |
| 1593 | 3631_HNF4_FOXA_diMut_TG13AC_n1 | GGGGGAGGCTGCACGTAAACATTAACCAAGGTCACCCCAGTTATCAGAGGAGCAAACAGGGGCAAAGTCCAC |
| 1594 | 3632_HNF4_FOXA_diMut_TG13AT_n1 | GGGGGAGGCTGCATGTAAACATTAACCAAGGTCACCCCAGTTATCAGAGGAGCAAACAGGGGCAAAGTCCAC |
| 1595 | 3635_HNF4_FOXA_diMut_TG13CT_n1 | GGGGGAGGCTGCCTGTAAACATTAACCAAGGTCACCCCAGTTATCAGAGGAGCAAACAGGGGCAAAGTCCAC |
| 1596 | 3637_HNF4_FOXA_diMut_TG13GC_n1 | GGGGGAGGCTGCGCGTAAACATTAACCAAGGTCACCCCAGTTATCAGAGGAGCAAACAGGGGCAAAGTCCAC |
| 1597 | 3638_HNF4_FOXA_diMut_TG13GT_n1 | GGGGGAGGCTGCGTGTAAACATTAACCAAGGTCACCCCAGTTATCAGAGGAGCAAACAGGGGCAAAGTCCAC |
| 1598 | 3649_HNF4_FOXA_diMut_GT15AC_n1 | GGGGGAGGCTGCTGACAAACATTAACCAAGGTCACCCCAGTTATCAGAGGAGCAAACAGGGGCAAAGTCCAC |
| 1599 | 3711_HNF4_FOXA_diMut_TT22AA_n1 | GGGGGAGGCTGCTGGTAAACAAAAACCAAGGTCACCCCAGTTATCAGAGGAGCAAACAGGGGCAAAGTCCAC |
| 1600 | 3713_HNF4_FOXA_diMut_TT22AG_n1 | GGGGGAGGCTGCTGGTAAACAAGAACCAAGGTCACCCCAGTTATCAGAGGAGCAAACAGGGGCAAAGTCCAC |
| 1601 | 3726_HNF4_FOXA_diMut_TA23GC_n1 | GGGGGAGGCTGCTGGTAAACATGCACCAAGGTCACCCCAGTTATCAGAGGAGCAAACAGGGGCAAAGTCCAC |
| 1602 | 3727_HNF4_FOXA_diMut_TA23GG_n1 | GGGGGAGGCTGCTGGTAAACATGGACCAAGGTCACCCCAGTTATCAGAGGAGCAAACAGGGGCAAAGTCCAC |
| 1603 | 3729_HNF4_FOXA_diMut_AA24CC_n1 | GGGGGAGGCTGCTGGTAAACATTCCCCAAGGTCACCCCAGTTATCAGAGGAGCAAACAGGGGCAAAGTCCAC |
| 1604 | 3730_HNF4_FOXA_diMut_AA24CG_n1 | GGGGGAGGCTGCTGGTAAACATTCGCCAAGGTCACCCCAGTTATCAGAGGAGCAAACAGGGGCAAAGTCCAC |
| 1605 | 3732_HNF4_FOXA_diMut_AA24GC_n1 | GGGGGAGGCTGCTGGTAAACATTGCCCAAGGTCACCCCAGTTATCAGAGGAGCAAACAGGGGCAAAGTCCAC |
| 1606 | 3733_HNF4_FOXA_diMut_AA24GG_n1 | GGGGGAGGCTGCTGGTAAACATTGGCCAAGGTCACCCCAGTTATCAGAGGAGCAAACAGGGGCAAAGTCCAC |
| 1607 | 3734_HNF4_FOXA_diMut_AA24GT_n1 | GGGGGAGGCTGCTGGTAAACATTGTCCAAGGTCACCCCAGTTATCAGAGGAGCAAACAGGGGCAAAGTCCAC |
| 1608 | 3735_HNF4_FOXA_diMut_AA24TC_n1 | GGGGGAGGCTGCTGGTAAACATTTCCCAAGGTCACCCCAGTTATCAGAGGAGCAAACAGGGGCAAAGTCCAC |
| 1609 | 3736_HNF4_FOXA_diMut_AA24TG_n1 | GGGGGAGGCTGCTGGTAAACATTTGCCAAGGTCACCCCAGTTATCAGAGGAGCAAACAGGGGCAAAGTCCAC |
| 1610 | 3738_HNF4_FOXA_diMut_AC25CA_n1 | GGGGGAGGCTGCTGGTAAACATTACACAAGGTCACCCCAGTTATCAGAGGAGCAAACAGGGGCAAAGTCCAC |
| 1611 | 3740_HNF4_FOXA_diMut_AC25CT_n1 | GGGGGAGGCTGCTGGTAAACATTACTCAAGGTCACCCCAGTTATCAGAGGAGCAAACAGGGGCAAAGTCCAC |
| 1612 | 3743_HNF4_FOXA_diMut_AC25GT_n1 | GGGGGAGGCTGCTGGTAAACATTAGTCAAGGTCACCCCAGTTATCAGAGGAGCAAACAGGGGCAAAGTCCAC |
| 1613 | 3763_HNF4_FOXA_diMut_CA27TG_n1 | GGGGGAGGCTGCTGGTAAACATTAACTGAGGTCACCCCAGTTATCAGAGGAGCAAACAGGGGCAAAGTCCAC |
| 1614 | 3814_HNF4_FOXA_diMut_CA33GG_n1 | GGGGGAGGCTGCTGGTAAACATTAACCAAGGTGGCCCCAGTTATCAGAGGAGCAAACAGGGGCAAAGTCCAC |
| 1615 | 3823_HNF4_FOXA_diMut_AC34GG_n1 | GGGGGAGGCTGCTGGTAAACATTAACCAAGGTCGGCCCAGTTATCAGAGGAGCAAACAGGGGCAAAGTCCAC |
| 1616 | 3828_HNF4_FOXA_diMut_CC35AA_n1 | GGGGGAGGCTGCTGGTAAACATTAACCAAGGTCAAACCAGTTATCAGAGGAGCAAACAGGGGCAAAGTCCAC |
| 1617 | 3830_HNF4_FOXA_diMut_CC35AT_n1 | GGGGGAGGCTGCTGGTAAACATTAACCAAGGTCAATCCAGTTATCAGAGGAGCAAACAGGGGCAAAGTCCAC |
| 1618 | 3831_HNF4_FOXA_diMut_CC35GA_n1 | GGGGGAGGCTGCTGGTAAACATTAACCAAGGTCAGACCAGTTATCAGAGGAGCAAACAGGGGCAAAGTCCAC |
| 1619 | 3833_HNF4_FOXA_diMut_CC35GT_n1 | GGGGGAGGCTGCTGGTAAACATTAACCAAGGTCAGTCCAGTTATCAGAGGAGCAAACAGGGGCAAAGTCCAC |
| 1620 | 3834_HNF4_FOXA_diMut_CC35TA_n1 | GGGGGAGGCTGCTGGTAAACATTAACCAAGGTCATACCAGTTATCAGAGGAGCAAACAGGGGCAAAGTCCAC |
| 1621 | 3836_HNF4_FOXA_diMut_CC35TT_n1 | GGGGGAGGCTGCTGGTAAACATTAACCAAGGTCATTCCAGTTATCAGAGGAGCAAACAGGGGCAAAGTCCAC |
| 1622 | 3838_HNF4_FOXA_diMut_CC36AG_n1 | GGGGGAGGCTGCTGGTAAACATTAACCAAGGTCACAGCAGTTATCAGAGGAGCAAACAGGGGCAAAGTCCAC |
| 1623 | 3842_HNF4_FOXA_diMut_CC36GT_n1 | GGGGGAGGCTGCTGGTAAACATTAACCAAGGTCACGTCAGTTATCAGAGGAGCAAACAGGGGCAAAGTCCAC |
| 1624 | 3845_HNF4_FOXA_diMut_CC36TT_n1 | GGGGGAGGCTGCTGGTAAACATTAACCAAGGTCACTTCAGTTATCAGAGGAGCAAACAGGGGCAAAGTCCAC |
| 1625 | 3846_HNF4_FOXA_diMut_CC37AA_n1 | GGGGGAGGCTGCTGGTAAACATTAACCAAGGTCACCAAAGTTATCAGAGGAGCAAACAGGGGCAAAGTCCAC |
| 1626 | 3847_HNF4_FOXA_diMut_CC37AG_n1 | GGGGGAGGCTGCTGGTAAACATTAACCAAGGTCACCAGAGTTATCAGAGGAGCAAACAGGGGCAAAGTCCAC |
| 1627 | 3849_HNF4_FOXA_diMut_CC37GA_n1 | GGGGGAGGCTGCTGGTAAACATTAACCAAGGTCACCGAAGTTATCAGAGGAGCAAACAGGGGCAAAGTCCAC |
| 1628 | 3850_HNF4_FOXA_diMut_CC37GG_n1 | GGGGGAGGCTGCTGGTAAACATTAACCAAGGTCACCGGAGTTATCAGAGGAGCAAACAGGGGCAAAGTCCAC |
| 1629 | 3852_HNF4_FOXA_diMut_CC37TA_n1 | GGGGGAGGCTGCTGGTAAACATTAACCAAGGTCACCTAAGTTATCAGAGGAGCAAACAGGGGCAAAGTCCAC |
| 1630 | 3853_HNF4_FOXA_diMut_CC37TG_n1 | GGGGGAGGCTGCTGGTAAACATTAACCAAGGTCACCTGAGTTATCAGAGGAGCAAACAGGGGCAAAGTCCAC |
| 1631 | 3855_HNF4_FOXA_diMut_CA38AC_n1 | GGGGGAGGCTGCTGGTAAACATTAACCAAGGTCACCCACGTTATCAGAGGAGCAAACAGGGGCAAAGTCCAC |
| 1632 | 3856_HNF4_FOXA_diMut_CA38AG_n1 | GGGGGAGGCTGCTGGTAAACATTAACCAAGGTCACCCAGGTTATCAGAGGAGCAAACAGGGGCAAAGTCCAC |
| 1633 | 3857_HNF4_FOXA_diMut_CA38AT_n1 | GGGGGAGGCTGCTGGTAAACATTAACCAAGGTCACCCATGTTATCAGAGGAGCAAACAGGGGCAAAGTCCAC |
| 1634 | 3858_HNF4_FOXA_diMut_CA38GC_n1 | GGGGGAGGCTGCTGGTAAACATTAACCAAGGTCACCCGCGTTATCAGAGGAGCAAACAGGGGCAAAGTCCAC |
| 1635 | 3860_HNF4_FOXA_diMut_CA38GT_n1 | GGGGGAGGCTGCTGGTAAACATTAACCAAGGTCACCCGTGTTATCAGAGGAGCAAACAGGGGCAAAGTCCAC |
| 1636 | 3864_HNF4_FOXA_diMut_AG39CA_n1 | GGGGGAGGCTGCTGGTAAACATTAACCAAGGTCACCCCCATTATCAGAGGAGCAAACAGGGGCAAAGTCCAC |
| 1637 | 3868_HNF4_FOXA_diMut_AG39GC_n1 | GGGGGAGGCTGCTGGTAAACATTAACCAAGGTCACCCCGCTTATCAGAGGAGCAAACAGGGGCAAAGTCCAC |
| 1638 | 3870_HNF4_FOXA_diMut_AG39TA_n1 | GGGGGAGGCTGCTGGTAAACATTAACCAAGGTCACCCCTATTATCAGAGGAGCAAACAGGGGCAAAGTCCAC |
| 1639 | 3871_HNF4_FOXA_diMut_AG39TC_n1 | GGGGGAGGCTGCTGGTAAACATTAACCAAGGTCACCCCTCTTATCAGAGGAGCAAACAGGGGCAAAGTCCAC |
| 1640 | 3872_HNF4_FOXA_diMut_AG39TT_n1 | GGGGGAGGCTGCTGGTAAACATTAACCAAGGTCACCCCTTTTATCAGAGGAGCAAACAGGGGCAAAGTCCAC |
| 1641 | 3880_HNF4_FOXA_diMut_GT40TC_n1 | GGGGGAGGCTGCTGGTAAACATTAACCAAGGTCACCCCATCTATCAGAGGAGCAAACAGGGGCAAAGTCCAC |
| 1642 | 3881_HNF4_FOXA_diMut_GT40TG_n1 | GGGGGAGGCTGCTGGTAAACATTAACCAAGGTCACCCCATGTATCAGAGGAGCAAACAGGGGCAAAGTCCAC |
| 1643 | 3883_HNF4_FOXA_diMut_TT41AC_n1 | GGGGGAGGCTGCTGGTAAACATTAACCAAGGTCACCCCAGACATCAGAGGAGCAAACAGGGGCAAAGTCCAC |
| 1644 | 3884_HNF4_FOXA_diMut_TT41AG_n1 | GGGGGAGGCTGCTGGTAAACATTAACCAAGGTCACCCCAGAGATCAGAGGAGCAAACAGGGGCAAAGTCCAC |
| 1645 | 3887_HNF4_FOXA_diMut_TT41CG_n1 | GGGGGAGGCTGCTGGTAAACATTAACCAAGGTCACCCCAGCGATCAGAGGAGCAAACAGGGGCAAAGTCCAC |
| 1646 | 3889_HNF4_FOXA_diMut_TT41GC_n1 | GGGGGAGGCTGCTGGTAAACATTAACCAAGGTCACCCCAGGCATCAGAGGAGCAAACAGGGGCAAAGTCCAC |
| 1647 | 3890_HNF4_FOXA_diMut_TT41GG_n1 | GGGGGAGGCTGCTGGTAAACATTAACCAAGGTCACCCCAGGGATCAGAGGAGCAAACAGGGGCAAAGTCCAC |
| 1648 | 3897_HNF4_FOXA_diMut_TA42GC_n1 | GGGGGAGGCTGCTGGTAAACATTAACCAAGGTCACCCCAGTGCTCAGAGGAGCAAACAGGGGCAAAGTCCAC |
| 1649 | 3904_HNF4_FOXA_diMut_AT43GC_n1 | GGGGGAGGCTGCTGGTAAACATTAACCAAGGTCACCCCAGTTGCCAGAGGAGCAAACAGGGGCAAAGTCCAC |
| 1650 | 3910_HNF4_FOXA_diMut_TC44AG_n1 | GGGGGAGGCTGCTGGTAAACATTAACCAAGGTCACCCCAGTTAAGAGAGGAGCAAACAGGGGCAAAGTCCAC |
| 1651 | 3913_HNF4_FOXA_diMut_TC44CG_n1 | GGGGGAGGCTGCTGGTAAACATTAACCAAGGTCACCCCAGTTACGAGAGGAGCAAACAGGGGCAAAGTCCAC |
| 1652 | 3917_HNF4_FOXA_diMut_TC44GT_n1 | GGGGGAGGCTGCTGGTAAACATTAACCAAGGTCACCCCAGTTAGTAGAGGAGCAAACAGGGGCAAAGTCCAC |
| 1653 | 3934_HNF4_FOXA_diMut_AG46TC_n1 | GGGGGAGGCTGCTGGTAAACATTAACCAAGGTCACCCCAGTTATCTCAGGAGCAAACAGGGGCAAAGTCCAC |
| 1654 | 3936_HNF4_FOXA_diMut_GA47AC_n1 | GGGGGAGGCTGCTGGTAAACATTAACCAAGGTCACCCCAGTTATCAACGGAGCAAACAGGGGCAAAGTCCAC |
| 1655 | 3938_HNF4_FOXA_diMut_GA47AT_n1 | GGGGGAGGCTGCTGGTAAACATTAACCAAGGTCACCCCAGTTATCAATGGAGCAAACAGGGGCAAAGTCCAC |
| 1656 | 3940_HNF4_FOXA_diMut_GA47CG_n1 | GGGGGAGGCTGCTGGTAAACATTAACCAAGGTCACCCCAGTTATCACGGGAGCAAACAGGGGCAAAGTCCAC |
| 1657 | 3941_HNF4_FOXA_diMut_GA47CT_n1 | GGGGGAGGCTGCTGGTAAACATTAACCAAGGTCACCCCAGTTATCACTGGAGCAAACAGGGGCAAAGTCCAC |
| 1658 | 3945_HNF4_FOXA_diMut_AG48CA_n1 | GGGGGAGGCTGCTGGTAAACATTAACCAAGGTCACCCCAGTTATCAGCAGAGCAAACAGGGGCAAAGTCCAC |
| 1659 | 3947_HNF4_FOXA_diMut_AG48CT_n1 | GGGGGAGGCTGCTGGTAAACATTAACCAAGGTCACCCCAGTTATCAGCTGAGCAAACAGGGGCAAAGTCCAC |
| 1660 | 3948_HNF4_FOXA_diMut_AG48GA_n1 | GGGGGAGGCTGCTGGTAAACATTAACCAAGGTCACCCCAGTTATCAGGAGAGCAAACAGGGGCAAAGTCCAC |
| 1661 | 3949_HNF4_FOXA_diMut_AG48GC_n1 | GGGGGAGGCTGCTGGTAAACATTAACCAAGGTCACCCCAGTTATCAGGCGAGCAAACAGGGGCAAAGTCCAC |
| 1662 | 3950_HNF4_FOXA_diMut_AG48GT_n1 | GGGGGAGGCTGCTGGTAAACATTAACCAAGGTCACCCCAGTTATCAGGTGAGCAAACAGGGGCAAAGTCCAC |
| 1663 | 3951_HNF4_FOXA_diMut_AG48TA_n1 | GGGGGAGGCTGCTGGTAAACATTAACCAAGGTCACCCCAGTTATCAGTAGAGCAAACAGGGGCAAAGTCCAC |
| 1664 | 3952_HNF4_FOXA_diMut_AG48TC_n1 | GGGGGAGGCTGCTGGTAAACATTAACCAAGGTCACCCCAGTTATCAGTCGAGCAAACAGGGGCAAAGTCCAC |
| 1665 | 3953_HNF4_FOXA_diMut_AG48TT_n1 | GGGGGAGGCTGCTGGTAAACATTAACCAAGGTCACCCCAGTTATCAGTTGAGCAAACAGGGGCAAAGTCCAC |
| 1666 | 3954_HNF4_FOXA_diMut_GG49AA_n1 | GGGGGAGGCTGCTGGTAAACATTAACCAAGGTCACCCCAGTTATCAGAAAAGCAAACAGGGGCAAAGTCCAC |
| 1667 | 3955_HNF4_FOXA_diMut_GG49AC_n1 | GGGGGAGGCTGCTGGTAAACATTAACCAAGGTCACCCCAGTTATCAGAACAGCAAACAGGGGCAAAGTCCAC |
| 1668 | 3956_HNF4_FOXA_diMut_GG49AT_n1 | GGGGGAGGCTGCTGGTAAACATTAACCAAGGTCACCCCAGTTATCAGAATAGCAAACAGGGGCAAAGTCCAC |
| 1669 | 3957_HNF4_FOXA_diMut_GG49CA_n1 | GGGGGAGGCTGCTGGTAAACATTAACCAAGGTCACCCCAGTTATCAGACAAGCAAACAGGGGCAAAGTCCAC |
| 1670 | 3959_HNF4_FOXA_diMut_GG49CT_n1 | GGGGGAGGCTGCTGGTAAACATTAACCAAGGTCACCCCAGTTATCAGACTAGCAAACAGGGGCAAAGTCCAC |
| 1671 | 3960_HNF4_FOXA_diMut_GG49TA_n1 | GGGGGAGGCTGCTGGTAAACATTAACCAAGGTCACCCCAGTTATCAGATAAGCAAACAGGGGCAAAGTCCAC |
| 1672 | 3967_HNF4_FOXA_diMut_GA50CG_n1 | GGGGGAGGCTGCTGGTAAACATTAACCAAGGTCACCCCAGTTATCAGAGCGGCAAACAGGGGCAAAGTCCAC |
| 1673 | 3968_HNF4_FOXA_diMut_GA50CT_n1 | GGGGGAGGCTGCTGGTAAACATTAACCAAGGTCACCCCAGTTATCAGAGCTGCAAACAGGGGCAAAGTCCAC |
| 1674 | 3969_HNF4_FOXA_diMut_GA50TC_n1 | GGGGGAGGCTGCTGGTAAACATTAACCAAGGTCACCCCAGTTATCAGAGTCGCAAACAGGGGCAAAGTCCAC |
| 1675 | 3972_HNF4_FOXA_diMut_AG51CA_n1 | GGGGGAGGCTGCTGGTAAACATTAACCAAGGTCACCCCAGTTATCAGAGGCACAAACAGGGGCAAAGTCCAC |
| 1676 | 3973_HNF4_FOXA_diMut_AG51CC_n1 | GGGGGAGGCTGCTGGTAAACATTAACCAAGGTCACCCCAGTTATCAGAGGCCCAAACAGGGGCAAAGTCCAC |
| 1677 | 3975_HNF4_FOXA_diMut_AG51GA_n1 | GGGGGAGGCTGCTGGTAAACATTAACCAAGGTCACCCCAGTTATCAGAGGGACAAACAGGGGCAAAGTCCAC |
| 1678 | 3979_HNF4_FOXA_diMut_AG51TC_n1 | GGGGGAGGCTGCTGGTAAACATTAACCAAGGTCACCCCAGTTATCAGAGGTCCAAACAGGGGCAAAGTCCAC |
| 1679 | 3982_HNF4_FOXA_diMut_GC52AG_n1 | GGGGGAGGCTGCTGGTAAACATTAACCAAGGTCACCCCAGTTATCAGAGGAAGAAACAGGGGCAAAGTCCAC |
| 1680 | 3989_HNF4_FOXA_diMut_GC52TT_n1 | GGGGGAGGCTGCTGGTAAACATTAACCAAGGTCACCCCAGTTATCAGAGGATTAAACAGGGGCAAAGTCCAC |
| 1682 | 4000_HNF4_FOXA_diMut_AA54CG_n1 | GGGGGAGGCTGCTGGTAAACATTAACCAAGGTCACCCCAGTTATCAGAGGAGCCGACAGGGGCAAAGTCCAC |
| 1682 | 4007_HNF4_FOXA_diMut_AA54TT_n1 | GGGGGAGGCTGCTGGTAAACATTAACCAAGGTCACCCCAGTTATCAGAGGAGCTTACAGGGGCAAAGTCCAC |
| 1683 | 4012_HNF4_FOXA_diMut_AA55GG_n1 | GGGGGAGGCTGCTGGTAAACATTAACCAAGGTCACCCCAGTTATCAGAGGAGCAGGCAGGGGCAAAGTCCAC |
| 1684 | 4033_HNF4_FOXA_diMut_CA57TG_n1 | GGGGGAGGCTGCTGGTAAACATTAACCAAGGTCACCCCAGTTATCAGAGGAGCAAATGGGGGCAAAGTCCAC |
| 1685 | 4038_HNF4_FOXA_diMut_AG58GA_n1 | GGGGGAGGCTGCTGGTAAACATTAACCAAGGTCACCCCAGTTATCAGAGGAGCAAACGAGGGCAAAGTCCAC |
| 1686 | 4068_HNF4_FOXA_diMut_GG61TA_n1 | GGGGGAGGCTGCTGGTAAACATTAACCAAGGTCACCCCAGTTATCAGAGGAGCAAACAGGTACAAAGTCCAC |
| 1687 | 4069_HNF4_FOXA_diMut_GG61TC_n1 | GGGGGAGGCTGCTGGTAAACATTAACCAAGGTCACCCCAGTTATCAGAGGAGCAAACAGGTCCAAAGTCCAC |
| 1688 | 4070_HNF4_FOXA_diMut_GG61TT_n1 | GGGGGAGGCTGCTGGTAAACATTAACCAAGGTCACCCCAGTTATCAGAGGAGCAAACAGGTTCAAAGTCCAC |
| 1689 | 4155_HNF4_FOXA_diMut_AC71GA_n1 | GGGGGAGGCTGCTGGTAAACATTAACCAAGGTCACCCCAGTTATCAGAGGAGCAAACAGGGGCAAAGTCCGA |

### REFERENCES

[0514] All publications and references, including but not limited to patents and patent applications, cited in this specification and Examples herein are incorporated by reference in their entirety as if each individual publication or reference were specifically and individually indicated to be incorporated by reference herein as being fully set forth. Any patent application to which this application claims priority is also incorporated by reference herein in the manner described above for publications and references.

The application's sequence listing, which the Patent Office published only in electronic form, follows.

SEQUENCE LISTING (1698 sequences)

SEQ ID NO: 1 - DNA, 218 bp, synthetic construct
  misc_feature 1..218: note = Synthetic: 3x_HNF4_FOXA_v1
  source 1..218: mol_type = other DNA
gggggaggctgctggtaaacattaaccaaggtcaccccagttatcagaggagcaaacaggggcaaagtccaccgggggaggctgctggtaaacattaaccaaggtcaccccagttatcagaggagcaaacaggggcaaagtccaccgggggaggctgctggtaaacattaaccaaggtcaccccagttatcagaggagcaaacaggggcaaagtccac

SEQ ID NO: 2 - DNA, 218 bp, synthetic construct
  misc_feature 1..218: note = Synthetic: 3x_HNF4_FOXA_v1_CpGmin
  source 1..218: mol_type = other DNA
aggggaggctgctggtaaacattaaccaaggtcaccccagttatcagaggagcaaacaggggcaaagtccacagggggaggctgctggtaaacattaaccaaggtcaccccagttatcagaggagcaaacaggggcaaagtccacagggggaggctgctggtaaacattaaccaaggtcaccccagttatcagaggagcaaacaggggcaaagtccat

SEQ ID NO: 3 - DNA, 215 bp, synthetic construct
  misc_feature 1..215: note = Synthetic: 3x_HNF4_FOXA_v1_SecondaryStruct_min_v1
  source 1..215: mol_type = other DNA
gagggaggctgctggtaaacattaaccaaggtcacccagttatcagaggagcaaacaggggcaaagtccaccgagggaggctgctggtaaacattaaccaaggtcacccagttatcagaggagcaaacaggggcaaagtccaccgagggaggctgctggtaaacattaaccaaggtcacccagttatcagaggagcaaacaggggcaaagtccac

SEQ ID NO: 4 - DNA, 214 bp, synthetic construct
  misc_feature 1..214: note = Synthetic: 3x_HNF4_FOXA_v1_SecondaryStruct_min_v1_CpG_min
  source 1..214: mol_type = other DNA
agggaggctgctggtaaacattaaccaaggtcacccagttatcagaggagcaaacaggggcaaagtccacagagggaggctgctggtaaacattaaccaaggtcacccagttatcagaggagcaaacaggggcaaagtccacagagggaggctgctggtaaacattaaccaaggtcacccagttatcagaggagcaaacaggggcaaagtccat

SEQ ID NO: 5 - DNA, 218 bp, synthetic construct
  misc_feature 1..218: note = Synthetic: 3x_HNF4_FOXA_v1_SecondaryStruct_min_v2
  source 1..218: mol_type = other DNA
gggggaggctgctggtaaacattaaccaaggtcacctcagttatcagaggagcaaacagggacaaagtccaccgggggaggctgctggtaaacattaaccaaggtcacctcagttatcagaggagcaaacagggacaaagtccaccgggggaggctgctggtaaacattaaccaaggtcacctcagttatcagaggagcaaacagggacaaagtccac

SEQ ID NO: 6 - DNA, 219 bp, synthetic construct
  misc_feature 1..219: note = Synthetic: 3x_HNF4_FOXA_v1_SecondaryStruct_min_v2_CpG_min
  source 1..219: mol_type = other DNA
aggggaggctgctggtaaacattaaccaaggtcacctcagttatcagaggagcaaacagggacaaagtccacagggggaggctgctggtaaacattaaccaaggtcacctcagttatcagaggagcaaacagggacaaagtccacagggggaggctgctggtaaacattaaccaaggtcacctcagttatcagaggagcaaacagggacaaagtccaca

SEQ ID NO: 7 - DNA, 212 bp, synthetic construct
  misc_feature 1..212: note = Synthetic: 3x_HNF4_FOXA_v1_SecondaryStruct_min_v3
  source 1..212: mol_type = other DNA
gggaggctgctggtaaacattaaccaaggtcaccccagttatcagaggagcaaacaagggcaaagtccaccgggaggctgctggtaaacattaaccaaggtcaccccagttatcagaggagcaaacaagggcaaagtccaccgggaggctgctggtaaacattaaccaaggtcaccccagttatcagaggagcaaacaagggcaaagtccac

SEQ ID NO: 8 - DNA, 214 bp, synthetic construct
  misc_feature 1..214: note = Synthetic: 3x_HNF4_FOXA_v1_SecondaryStruct_min_v3_CpG_min
  source 1..214: mol_type = other DNA
agggaggctgctggtaaacattaaccaaggtcaccccagttatcagaggagcaaacaagggcaaagtccacagggaggctgctggtaaacattaaccaaggtcaccccagttatcagaggagcaaacaagggcaaagtccacagggaggctgctggtaaacattaaccaaggtcaccccagttatcagaggagcaaacaagggcaaagtccaca

SEQ ID NO: 9 - DNA, 220 bp, synthetic construct
  misc_feature 1..220: note = Synthetic: 3x_HNF4_FOXA_v1_SecondaryStruct_min_v4_Aspacers (no spacer inbetween the repeats)
  source 1..220: mol_type = other DNA
aggaggaggctgctggtaaacattaaccaaggtcacctcagttatcagaggagcaaacaggggcaaagtccacaggaggaggctgctggtaaacattaaccaaggtcacctcagttatcagaggagcaaacaggggcaaagtccacaggaggaggctgctggtaaacattaaccaaggtcacctcagttatcagaggagcaaacaggggcaaagtccaca

SEQ ID NO: 10 - DNA, 220 bp, synthetic construct
  misc_feature 1..220: note = Synthetic: 3x_HNF4_FOXA_v1_SecondaryStruct_min_v5_Aspacers ( A  spacer inbetween the repeats)
  source 1..220: mol_type = other DNA
agggggaggctgctggtaaacattaaccaaggtcacctcagttatcagaggagcaaacaggtgcaaagtccacagggggaggctgctggtaaacattaaccaaggtcacctcagttatcagaggagcaaacaggtgcaaagtccacagggggaggctgctggtaaacattaaccaaggtcacctcagttatcagaggagcaaacaggtgcaaagtccaca

SEQ ID NO: 11 - DNA, 220 bp, synthetic construct
  misc_feature 1..220: note = Synthetic: 3x_HNF4_FOXA_v1_SecondaryStruct_min_v6_Aspacers ( A  spacer inbetween the repeats)
  source 1..220: mol_type = other DNA
aggaggaggctgctggtaaacattaaccaaggtcaccccagttatcagaggagcaaacaggtgcaaagtccacaggaggaggctgctggtaaacattaaccaaggtcaccccagttatcagaggagcaaacaggtgcaaagtccacaggaggaggctgctggtaaacattaaccaaggtcaccccagttatcagaggagcaaacaggtgcaaagtccaca

SEQ ID NO: 12 - DNA, 209 bp, synthetic construct
  misc_feature 1..209: note = Synthetic: 3x_ChineseTreeShrew
  source 1..209: mol_type = other DNA
ggaggctgttggtgaatattaaccaaggtcacctcagttatcggaggagcaaacaagggctaagtccaccggaggctgttggtgaatattaaccaaggtcacctcagttatcggaggagcaaacaagggctaagtccaccggaggctgttggtgaatattaaccaaggtcacctcagttatcggaggagcaaacaagggctaagtccac

SEQ ID NO: 13 - DNA, 211 bp, synthetic construct
  misc_feature 1..211: note = Synthetic: 3x_ChineseTreeShrew_CpGmin
  source 1..211: mol_type = other DNA
aggaggctgttggtgaatattaaccaaggtcacctcagttatcagaggagcaaacaagggctaagtccacaggaggctgttggtgaatattaaccaaggtcacctcagttatcagaggagcaaacaagggctaagtccacaggaggctgttggtgaatattaaccaaggtcacctcagttatcagaggagcaaacaagggctaagtccaca

SEQ ID NO: 14 - DNA, 218 bp, synthetic construct
  misc_feature 1..218: note = Synthetic: 3x_hSerpEnh_Aspacers
  source 1..218: mol_type = other DNA
gggggaggctgctggtgaatattaaccaaggtcaccccagttatcggaggagcaaacaggggctaagtccacagggggaggctgctggtgaatattaaccaaggtcaccccagttatcggaggagcaaacaggggctaagtccacagggggaggctgctggtgaatattaaccaaggtcaccccagttatcggaggagcaaacaggggctaagtccac

SEQ ID NO: 15 - DNA, 212 bp, synthetic construct
  misc_feature 1..212: note = Synthetic: 3x_Bushbaby_Aspacers
  source 1..212: mol_type = other DNA
aggggaagctactggtgaatattaaccaaggtcacccagttatcagggagcaaacaggagctaagtccatagggggaagctactggtgaatattaaccaaggtcacccagttatcagggagcaaacaggagctaagtccatagggggaagctactggtgaatattaaccaaggtcacccagttatcagggagcaaacaggagctaagtccat

SEQ ID NO: 16 - DNA, 364 bp, synthetic construct
  misc_feature 1..364: note = Synthetic: 5x_HNF4_FOXA_v1
  source 1..364: mol_type = other DNA
gggggaggctgctggtaaacattaaccaaggtcaccccagttatcagaggagcaaacaggggcaaagtccaccgggggaggctgctggtaaacattaaccaaggtcaccccagttatcagaggagcaaacaggggcaaagtccaccgggggaggctgctggtaaacattaaccaaggtcaccccagttatcagaggagcaaacaggggcaaagtccaccgggggaggctgctggtaaacattaaccaaggtcaccccagttatcagaggagcaaacaggggcaaagtccaccgggggaggctgctggtaaacattaaccaaggtcaccccagttatcagaggagcaaacaggggcaaagtccac

SEQ ID NO: 17 - DNA, 359 bp, synthetic construct
  misc_feature 1..359: note = Synthetic: 5x_HNF4_FOXA_v1_SecondaryStruct_min_v1
  source 1..359: mol_type = other DNA
gagggaggctgctggtaaacattaaccaaggtcacccagttatcagaggagcaaacaggggcaaagtccaccgagggaggctgctggtaaacattaaccaaggtcacccagttatcagaggagcaaacaggggcaaagtccaccgagggaggctgctggtaaacattaaccaaggtcacccagttatcagaggagcaaacaggggcaaagtccaccgagggaggctgctggtaaacattaaccaaggtcacccagttatcagaggagcaaacaggggcaaagtccaccgagggaggctgctggtaaacattaaccaaggtcacccagttatcagaggagcaaacaggggcaaagtccac

SEQ ID NO: 18 - DNA, 358 bp, synthetic construct
  misc_feature 1..358: note = Synthetic: 5x_HNF4_FOXA_v1_SecondaryStruct_min_v1_CpG_min
  source 1..358: mol_type = other DNA
agggaggctgctggtaaacattaaccaaggtcacccagttatcagaggagcaaacaggggcaaagtccacagagggaggctgctggtaaacattaaccaaggtcacccagttatcagaggagcaaacaggggcaaagtccacagagggaggctgctggtaaacattaaccaaggtcacccagttatcagaggagcaaacaggggcaaagtccacagagggaggctgctggtaaacattaaccaaggtcacccagttatcagaggagcaaacaggggcaaagtccacagagggaggctgctggtaaacattaaccaaggtcacccagttatcagaggagcaaacaggggcaaagtccat

SEQ ID NO: 19 - DNA, 364 bp, synthetic construct
  misc_feature 1..364: note = Synthetic: 5x_HNF4_FOXA_v1_SecondaryStruct_min_v2
  source 1..364: mol_type = other DNA
gggggaggctgctggtaaacattaaccaaggtcacctcagttatcagaggagcaaacagggacaaagtccaccgggggaggctgctggtaaacattaaccaaggtcacctcagttatcagaggagcaaacagggacaaagtccaccgggggaggctgctggtaaacattaaccaaggtcacctcagttatcagaggagcaaacagggacaaagtccaccgggggaggctgctggtaaacattaaccaaggtcacctcagttatcagaggagcaaacagggacaaagtccaccgggggaggctgctggtaaacattaaccaaggtcacctcagttatcagaggagcaaacagggacaaagtccac

SEQ ID NO: 20 - DNA, 365 bp, synthetic construct
  misc_feature 1..365: note = Synthetic: 5x_HNF4_FOXA_v1_SecondaryStruct_min_v2_CpG_min
  source 1..365: mol_type = other DNA
aggggaggctgctggtaaacattaaccaaggtcacctcagttatcagaggagcaaacagggacaaagtccacagggggaggctgctggtaaacattaaccaaggtcacctcagttatcagaggagcaaacagggacaaagtccacagggggaggctgctggtaaacattaaccaaggtcacctcagttatcagaggagcaaacagggacaaagtccacagggggaggctgctggtaaacattaaccaaggtcacctcagttatcagaggagcaaacagggacaaagtccacagggggaggctgctggtaaacattaaccaaggtcacctcagttatcagaggagcaaacagggacaaagtccaca

SEQ ID NO: 21 - DNA, 354 bp, synthetic construct
  misc_feature 1..354: note = Synthetic: 5x_HNF4_FOXA_v1_SecondaryStruct_min_v3
  source 1..354: mol_type = other DNA
gggaggctgctggtaaacattaaccaaggtcaccccagttatcagaggagcaaacaagggcaaagtccaccgggaggctgctggtaaacattaaccaaggtcaccccagttatcagaggagcaaacaagggcaaagtccaccgggaggctgctggtaaacattaaccaaggtcaccccagttatcagaggagcaaacaagggcaaagtccaccgggaggctgctggtaaacattaaccaaggtcaccccagttatcagaggagcaaacaagggcaaagtccaccgggaggctgctggtaaacattaaccaaggtcaccccagttatcagaggagcaaacaagggcaaagtccac

SEQ ID NO: 22 - DNA, 356 bp, synthetic construct
  misc_feature 1..356: note = Synthetic: 5x_HNF4_FOXA_v1_SecondaryStruct_min_v3_CpG_min
  source 1..356: mol_type = other DNA
agggaggctgctggtaaacattaaccaaggtcaccccagttatcagaggagcaaacaagggcaaagtccacagggaggctgctggtaaacattaaccaaggtcaccccagttatcagaggagcaaacaagggcaaagtccacagggaggctgctggtaaacattaaccaaggtcaccccagttatcagaggagcaaacaagggcaaagtccacagggaggctgctggtaaacattaaccaaggtcaccccagttatcagaggagcaaacaagggcaaagtccacagggaggctgctggtaaacattaaccaaggtcaccccagttatcagaggagcaaacaagggcaaagtccaca

SEQ ID NO: 23 - DNA, 366 bp, synthetic construct
  misc_feature 1..366: note = Synthetic: 5x_HNF4_FOXA_v1_SecondaryStruct_min_v4_Aspacers
  source 1..366: mol_type = other DNA
aggaggaggctgctggtaaacattaaccaaggtcacctcagttatcagaggagcaaacaggggcaaagtccacaggaggaggctgctggtaaacattaaccaaggtcacctcagttatcagaggagcaaacaggggcaaagtccacaggaggaggctgctggtaaacattaaccaaggtcacctcagttatcagaggagcaaacaggggcaaagtccacaggaggaggctgctggtaaacattaaccaaggtcacctcagttatcagaggagcaaacaggggcaaagtccacaggaggaggctgctggtaaacattaaccaaggtcacctcagttatcagaggagcaaacaggggcaaagtccaca

SEQ ID NO: 24 - DNA, 366 bp, synthetic construct
  misc_feature 1..366: note = Synthetic: 5x_HNF4_FOXA_v1_SecondaryStruct_min_v5_Aspacers
  source 1..366: mol_type = other DNA
agggggaggctgctggtaaacattaaccaaggtcacctcagttatcagaggagcaaacaggtgcaaagtccacagggggaggctgctggtaaacattaaccaaggtcacctcagttatcagaggagcaaacaggtgcaaagtccacagggggaggctgctggtaaacattaaccaaggtcacctcagttatcagaggagcaaacaggtgcaaagtccacagggggaggctgctggtaaacattaaccaaggtcacctcagttatcagaggagcaaacaggtgcaaagtccacagggggaggctgctggtaaacattaaccaaggtcacctcagttatcagaggagcaaacaggtgcaaagtccaca

SEQ ID NO: 25 - DNA, 366 bp, synthetic construct
  misc_feature 1..366: note = Synthetic: 5x_HNF4_FOXA_v1_SecondaryStruct_min_v6_Aspacers
  source 1..366: mol_type = other DNA
aggaggaggctgctggtaaacattaaccaaggtcaccccagttatcagaggagcaaacaggtgcaaagtccacaggaggaggctgctggtaaacattaaccaaggtcaccccagttatcagaggagcaaacaggtgcaaagtccacaggaggaggctgctggtaaacattaaccaaggtcaccccagttatcagaggagcaaacaggtgcaaagtccacaggaggaggctgctggtaaacattaaccaaggtcaccccagttatcagaggagcaaacaggtgcaaagtccacaggaggaggctgctggtaaacattaaccaaggtcaccccagttatcagaggagcaaacaggtgcaaagtccaca

SEQ ID NO: 26 - DNA, 349 bp, synthetic construct
  misc_feature 1..349: note = Synthetic: 5x_ChineseTreeShrew
  source 1..349: mol_type = other DNA
ggaggctgttggtgaatattaaccaaggtcacctcagttatcggaggagcaaacaagggctaagtccaccggaggctgttggtgaatattaaccaaggtcacctcagttatcggaggagcaaacaagggctaagtccaccggaggctgttggtgaatattaaccaaggtcacctcagttatcggaggagcaaacaagggctaagtccaccggaggctgttggtgaatattaaccaaggtcacctcagttatcggaggagcaaacaagggctaagtccaccggaggctgttggtgaatattaaccaaggtcacctcagttatcggaggagcaaacaagggctaagtccac

SEQ ID NO: 27 - DNA, 351 bp, synthetic construct
  misc_feature 1..351: note = Synthetic: 5x_ChineseTreeShrew_CpGmin
  source 1..351: mol_type = other DNA
aggaggctgttggtgaatattaaccaaggtcacctcagttatcagaggagcaaacaagggctaagtccacaggaggctgttggtgaatattaaccaaggtcacctcagttatcagaggagcaaacaagggctaagtccacaggaggctgttggtgaatattaaccaaggtcacctcagttatcagaggagcaaacaagggctaagtccacaggaggctgttggtgaatattaaccaaggtcacctcagttatcagaggagcaaacaagggctaagtccacaggaggctgttggtgaatattaaccaaggtcacctcagttatcagaggagcaaacaagggctaagtccaca

SEQ ID NO: 28 - DNA, 354 bp, synthetic construct
  misc_feature 1..354: note = Synthetic: 5x_Bushbaby_Aspacers
  source 1..354: mol_type = other DNA
aggggaagctactggtgaatattaaccaaggtcacccagttatcagggagcaaacaggagctaagtccatagggggaagctactggtgaatattaaccaaggtcacccagttatcagggagcaaacaggagctaagtccatagggggaagctactggtgaatattaaccaaggtcacccagttatcagggagcaaacaggagctaagtccatagggggaagctactggtgaatattaaccaaggtcacccagttatcagggagcaaacaggagctaagtccatagggggaagctactggtgaatattaaccaaggtcacccagttatcagggagcaaacaggagctaagtccat

SEQ ID NO: 29 - DNA, 364 bp, synthetic construct
  misc_feature 1..364: note = Synthetic: 5x_hSerpEnh
  source 1..364: mol_type = other DNA
gggggaggctgctggtgaatattaaccaaggtcaccccagttatcggaggagcaaacaggggctaagtccaccgggggaggctgctggtgaatattaaccaaggtcaccccagttatcggaggagcaaacaggggctaagtccaccgggggaggctgctggtgaatattaaccaaggtcaccccagttatcggaggagcaaacaggggctaagtccaccgggggaggctgctggtgaatattaaccaaggtcaccccagttatcggaggagcaaacaggggctaagtccaccgggggaggctgctggtgaatattaaccaaggtcaccccagttatcggaggagcaaacaggggctaagtccac

SEQ ID NO: 30 - DNA, 729 bp, synthetic construct
  misc_feature 1..729: note = Synthetic: 10x_HNF4_FOXA_v1
  source 1..729: mol_type = other DNA
gggggaggctgctggtaaacattaaccaaggtcaccccagttatcagaggagcaaacaggggcaaagtccaccgggggaggctgctggtaaacattaaccaaggtcaccccagttatcagaggagcaaacaggggcaaagtccaccgggggaggctgctggtaaacattaaccaaggtcaccccagttatcagaggagcaaacaggggcaaagtccaccgggggaggctgctggtaaacattaaccaaggtcaccccagttatcagaggagcaaacaggggcaaagtccaccgggggaggctgctggtaaacattaaccaaggtcaccccagttatcagaggagcaaacaggggcaaagtccaccgggggaggctgctggtaaacattaaccaaggtcaccccagttatcagaggagcaaacaggggcaaagtccaccgggggaggctgctggtaaacattaaccaaggtcaccccagttatcagaggagcaaacaggggcaaagtccaccgggggaggctgctggtaaacattaaccaaggtcaccccagttatcagaggagcaaacaggggcaaagtccaccgggggaggctgctggtaaacattaaccaaggtcaccccagttatcagaggagcaaacaggggcaaagtccaccgggggaggctgctggtaaacattaaccaaggtcaccccagttatcagaggagcaaacaggggcaaagtccac

SEQ ID NO: 31 - DNA, 719 bp, synthetic construct
  misc_feature 1..719: note = Synthetic: 10x_HNF4_FOXA_v1_SecondaryStruct_min_v1
  source 1..719: mol_type = other DNA
gagggaggctgctggtaaacattaaccaaggtcacccagttatcagaggagcaaacaggggcaaagtccaccgagggaggctgctggtaaacattaaccaaggtcacccagttatcagaggagcaaacaggggcaaagtccaccgagggaggctgctggtaaacattaaccaaggtcacccagttatcagaggagcaaacaggggcaaagtccaccgagggaggctgctggtaaacattaaccaaggtcacccagttatcagaggagcaaacaggggcaaagtccaccgagggaggctgctggtaaacattaaccaaggtcacccagttatcagaggagcaaacaggggcaaagtccaccgagggaggctgctggtaaacattaaccaaggtcacccagttatcagaggagcaaacaggggcaaagtccaccgagggaggctgctggtaaacattaaccaaggtcacccagttatcagaggagcaaacaggggcaaagtccaccgagggaggctgctggtaaacattaaccaaggtcacccagttatcagaggagcaaacaggggcaaagtccaccgagggaggctgctggtaaacattaaccaaggtcacccagttatcagaggagcaaacaggggcaaagtccaccgagggaggctgctggtaaacattaaccaaggtcacccagttatcagaggagcaaacaggggcaaagtccac

SEQ ID NO: 32 - DNA, 718 bp, synthetic construct
  misc_feature 1..718: note = Synthetic: 10x_HNF4_FOXA_v1_SecondaryStruct_min_v1_CpG_min
  source 1..718: mol_type = other DNA
agggaggctgctggtaaacattaaccaaggtcacccagttatcagaggagcaaacaggggcaaagtccacagagggaggctgctggtaaacattaaccaaggtcacccagttatcagaggagcaaacaggggcaaagtccacagagggaggctgctggtaaacattaaccaaggtcacccagttatcagaggagcaaacaggggcaaagtccacagagggaggctgctggtaaacattaaccaaggtcacccagttatcagaggagcaaacaggggcaaagtccacagagggaggctgctggtaaacattaaccaaggtcacccagttatcagaggagcaaacaggggcaaagtccacagagggaggctgctggtaaacattaaccaaggtcacccagttatcagaggagcaaacaggggcaaagtccacagagggaggctgctggtaaacattaaccaaggtcacccagttatcagaggagcaaacaggggcaaagtccacagagggaggctgctggtaaacattaaccaaggtcacccagttatcagaggagcaaacaggggcaaagtccacagagggaggctgctggtaaacattaaccaaggtcacccagttatcagaggagcaaacaggggcaaagtccacagagggaggctgctggtaaacattaaccaaggtcacccagttatcagaggagcaaacaggggcaaagtccat

SEQ ID NO: 33 - DNA, 729 bp, synthetic construct
  misc_feature 1..729: note = Synthetic: 10x_HNF4_FOXA_v1_SecondaryStruct_min_v2
  source 1..729: mol_type = other DNA
gggggaggctgctggtaaacattaaccaaggtcacctcagttatcagaggagcaaacagggacaaagtccaccgggggaggctgctggtaaacattaaccaaggtcacctcagttatcagaggagcaaacagggacaaagtccaccgggggaggctgctggtaaacattaaccaaggtcacctcagttatcagaggagcaaacagggacaaagtccaccgggggaggctgctggtaaacattaaccaaggtcacctcagttatcagaggagcaaacagggacaaagtccaccgggggaggctgctggtaaacattaaccaaggtcacctcagttatcagaggagcaaacagggacaaagtccaccgggggaggctgctggtaaacattaaccaaggtcacctcagttatcagaggagcaaacagggacaaagtccaccgggggaggctgctggtaaacattaaccaaggtcacctcagttatcagaggagcaaacagggacaaagtccaccgggggaggctgctggtaaacattaaccaaggtcacctcagttatcagaggagcaaacagggacaaagtccaccgggggaggctgctggtaaacattaaccaaggtcacctcagttatcagaggagcaaacagggacaaagtccaccgggggaggctgctggtaaacattaaccaaggtcacctcagttatcagaggagcaaacagggacaaagtccac

SEQ ID NO: 34 - DNA, 730 bp, synthetic construct
  misc_feature 1..730: note = Synthetic: 10x_HNF4_FOXA_v1_SecondaryStruct_min_v2_CpG_min
  source 1..730: mol_type = other DNA
aggggaggctgctggtaaacattaaccaaggtcacctcagttatcagaggagcaaacagggacaaagtccacagggggaggctgctggtaaacattaaccaaggtcacctcagttatcagaggagcaaacagggacaaagtccacagggggaggctgctggtaaacattaaccaaggtcacctcagttatcagaggagcaaacagggacaaagtccacagggggaggctgctggtaaacattaaccaaggtcacctcagttatcagaggagcaaacagggacaaagtccacagggggaggctgctggtaaacattaaccaaggtcacctcagttatcagaggagcaaacagggacaaagtccacagggggaggctgctggtaaacattaaccaaggtcacctcagttatcagaggagcaaacagggacaaagtccacagggggaggctgctggtaaacattaaccaaggtcacctcagttatcagaggagcaaacagggacaaagtccacagggggaggctgctggtaaacattaaccaaggtcacctcagttatcagaggagcaaacagggacaaagtccacagggggaggctgctggtaaacattaaccaaggtcacctcagttatcagaggagcaaacagggacaaagtccacagggggaggctgctggtaaacattaaccaaggtcacctcagttatcagaggagcaaacagggacaaagtccaca

SEQ ID NO: 35 - DNA, 709 bp, synthetic construct
  misc_feature 1..709: note = Synthetic: 10x_HNF4_FOXA_v1_SecondaryStruct_min_v3
  source 1..709: mol_type = other DNA
gggaggctgctggtaaacattaaccaaggtcaccccagttatcagaggagcaaacaagggcaaagtccaccgggaggctgctggtaaacattaaccaaggtcaccccagttatcagaggagcaaacaagggcaaagtccaccgggaggctgctggtaaacattaaccaaggtcaccccagttatcagaggagcaaacaagggcaaagtccaccgggaggctgctggtaaacattaaccaaggtcaccccagttatcagaggagcaaacaagggcaaagtccaccgggaggctgctggtaaacattaaccaaggtcaccccagttatcagaggagcaaacaagggcaaagtccaccgggaggctgctggtaaacattaaccaaggtcaccccagttatcagaggagcaaacaagggcaaagtccaccgggaggctgctggtaaacattaaccaaggtcaccccagttatcagaggagcaaacaagggcaaagtccaccgggaggctgctggtaaacattaaccaaggtcaccccagttatcagaggagcaaacaagggcaaagtccaccgggaggctgctggtaaacattaaccaaggtcaccccagttatcagaggagcaaacaagggcaaagtccaccgggaggctgctggtaaacattaaccaaggtcaccccagttatcagaggagcaaacaagggcaaagtccac

SEQ ID NO: 36 - DNA, 711 bp, synthetic construct
  misc_feature 1..711: note = Synthetic: 10x_HNF4_FOXA_v1_SecondaryStruct_min_v3_CpG_min
  source 1..711: mol_type = other DNA
agggaggctgctggtaaacattaaccaaggtcaccccagttatcagaggagcaaacaagggcaaagtccacagggaggctgctggtaaacattaaccaaggtcaccccagttatcagaggagcaaacaagggcaaagtccacagggaggctgctggtaaacattaaccaaggtcaccccagttatcagaggagcaaacaagggcaaagtccacagggaggctgctggtaaacattaaccaaggtcaccccagttatcagaggagcaaacaagggcaaagtccacagggaggctgctggtaaacattaaccaaggtcaccccagttatcagaggagcaaacaagggcaaagtccacagggaggctgctggtaaacattaaccaaggtcaccccagttatcagaggagcaaacaagggcaaagtccacagggaggctgctggtaaacattaaccaaggtcaccccagttatcagaggagcaaacaagggcaaagtccacagggaggctgctggtaaacattaaccaaggtcaccccagttatcagaggagcaaacaagggcaaagtccacagggaggctgctggtaaacattaaccaaggtcaccccagttatcagaggagcaaacaagggcaaagtccacagggaggctgctggtaaacattaaccaaggtcaccccagttatcagaggagcaaacaagggcaaagtccaca

SEQ ID NO: 37 - DNA, 729 bp, synthetic construct
  misc_feature 1..729: note = Synthetic: 10x_hSerpEnh
  source 1..729: mol_type = other DNA
gggggaggctgctggtgaatattaaccaaggtcaccccagttatcggaggagcaaacaggggctaagtccaccgggggaggctgctggtgaatattaaccaaggtcaccccagttatcggaggagcaaacaggggctaagtccaccgggggaggctgctggtgaatattaaccaaggtcaccccagttatcggaggagcaaacaggggctaagtccaccgggggaggctgctggtgaatattaaccaaggtcaccccagttatcggaggagcaaacaggggctaagtccaccgggggaggctgctggtgaatattaaccaaggtcaccccagttatcggaggagcaaacaggggctaagtccaccgggggaggctgctggtgaatattaaccaaggtcaccccagttatcggaggagcaaacaggggctaagtccaccgggggaggctgctggtgaatattaaccaaggtcaccccagttatcggaggagcaaacaggggctaagtccaccgggggaggctgctggtgaatattaaccaaggtcaccccagttatcggaggagcaaacaggggctaagtccaccgggggaggctgctggtgaatattaaccaaggtcaccccagttatcggaggagcaaacaggggctaagtccaccgggggaggctgctggtgaatattaaccaaggtcaccccagttatcggaggagcaaacaggggctaagtccac

SEQ ID NO: 38 - DNA, 709 bp, synthetic construct
  misc_feature 1..709: note = Synthetic: 10x_Bushbaby_Aspacers
  source 1..709: mol_type = other DNA
aggggaagctactggtgaatattaaccaaggtcacccagttatcagggagcaaacaggagctaagtccatagggggaagctactggtgaatattaaccaaggtcacccagttatcagggagcaaacaggagctaagtccatagggggaagctactggtgaatattaaccaaggtcacccagttatcagggagcaaacaggagctaagtccatagggggaagctactggtgaatattaaccaaggtcacccagttatcagggagcaaacaggagctaagtccatagggggaagctactggtgaatattaaccaaggtcacccagttatcagggagcaaacaggagctaagtccatagggggaagctactggtgaatattaaccaaggtcacccagttatcagggagcaaacaggagctaagtccatagggggaagctactggtgaatattaaccaaggtcacccagttatcagggagcaaacaggagctaagtccatagggggaagctactggtgaatattaaccaaggtcacccagttatcagggagcaaacaggagctaagtccatagggggaagctactggtgaatattaaccaaggtcacccagttatcagggagcaaacaggagctaagtccatagggggaagctactggtgaatattaaccaaggtcacccagttatcagggagcaaacaggagctaagtccat

SEQ ID NO: 39 - DNA, 216 bp, synthetic construct
  misc_feature 1..216: note = Synthetic: Bushbaby_HN4F/FOXv1_HNF4mod
  source 1..216: mol_type = other DNA
gggggaagctactggtgaatattaaccaaggtcacccagttatcagggagcaaacaggagctaagtccatagggggaggctgctggtaaacattaaccaaggtcaccccagttatcagaggagcaaacaggggcaaagtccacagagggaggctgctggtgaatattaaccaaggtcacctcagttatcagaggagcaaacaggggcaaagtccat

SEQ ID NO: 40 - DNA, 217 bp, synthetic construct
  misc_feature 1..217: note = Synthetic: HNF4mod_BushbabyMod_HN4F/FOXv1
  source 1..217: mol_type = other DNA
agagggaggctgctggtgaatattaaccaaggtcacctcagttatcagaggagcaaacaggggcaaagtccatagagggaagctactggtgaatattaaccaaggtcacccagttatcagggagcaaacaggagctaagtccatagggggaggctgctggtaaacattaaccaaggtcaccccagttatcagaggagcaaacaggggcaaagtccac

SEQ ID NO: 41 - DNA, 220 bp, synthetic construct
  misc_feature 1..220: note = Synthetic: 3x_hSerpEnh_2mer_spacers_v1
  source 1..220: mol_type = other DNA
gggggaggctgctggtgaatattaaccaaggtcaccccagttatcggaggagcaaacaggggctaagtccacaagggggaggctgctggtgaatattaaccaaggtcaccccagttatcggaggagcaaacaggggctaagtccaccagggggaggctgctggtgaatattaaccaaggtcaccccagttatcggaggagcaaacaggggctaagtccac

SEQ ID NO: 42 - DNA, 220 bp, synthetic construct
  misc_feature 1..220: note = Synthetic: 3x_hSerpEnh_2mer_spacers_v2
  source 1..220: mol_type = other DNA
gggggaggctgctggtgaatattaaccaaggtcaccccagttatcggaggagcaaacaggggctaagtccacaagggggaggctgctggtgaatattaaccaaggtcaccccagttatcggaggagcaaacaggggctaagtccacctgggggaggctgctggtgaatattaaccaaggtcaccccagttatcggaggagcaaacaggggctaagtccac

SEQ ID NO: 43 - DNA, 220 bp, synthetic construct
  misc_feature 1..220: note = Synthetic: 3x_hSerpEnh_2mer_spacers_v3
  source 1..220: mol_type = other DNA
gggggaggctgctggtgaatattaaccaaggtcaccccagttatcggaggagcaaacaggggctaagtccacaagggggaggctgctggtgaatattaaccaaggtcaccccagttatcggaggagcaaacaggggctaagtccactagggggaggctgctggtgaatattaaccaaggtcaccccagttatcggaggagcaaacaggggctaagtccac

SEQ ID NO: 44 - DNA, 220 bp, synthetic construct
  misc_feature 1..220: note = Synthetic: 3x_hSerpEnh_2mer_spacers_v4
  source 1..220: mol_type = other DNA
gggggaggctgctggtgaatattaaccaaggtcaccccagttatcggaggagcaaacaggggctaagtccacaagggggaggctgctggtgaatattaaccaaggtcaccccagttatcggaggagcaaacaggggctaagtccacttgggggaggctgctggtgaatattaaccaaggtcaccccagttatcggaggagcaaacaggggctaagtccac

SEQ ID NO: 45 - DNA, 220 bp, synthetic construct
  misc_feature 1..220: note = Synthetic: 3x_hSerpEnh_2mer_spacers_v5
  source 1..220: mol_type = other DNA
gggggaggctgctggtgaatattaaccaaggtcaccccagttatcggaggagcaaacaggggctaagtccaccagggggaggctgctggtgaatattaaccaaggtcaccccagttatcggaggagcaaacaggggctaagtccacaagggggaggctgctggtgaatattaaccaaggtcaccccagttatcggaggagcaaacaggggctaagtccac

SEQ ID NO: 46 - DNA, 220 bp, synthetic construct
  misc_feature 1..220: note = Synthetic: 3x_hSerpEnh_2mer_spacers_v6
  source 1..220: mol_type = other DNA
gggggaggctgctggtgaatattaaccaaggtcaccccagttatcggaggagcaaacaggggctaagtccaccagggggaggctgctggtgaatattaaccaaggtcaccccagttatcggaggagcaaacaggggctaagtccacctgggggaggctgctggtgaatattaaccaaggtcaccccagttatcggaggagcaaacaggggctaagtccac

SEQ ID NO: 47 - DNA, 220 bp, synthetic construct
  misc_feature 1..220: note = Synthetic: 3x_hSerpEnh_2mer_spacers_v7
  source 1..220: mol_type = other DNA
gggggaggctgctggtgaatattaaccaaggtcaccccagttatcggaggagcaaacaggggctaagtccaccagggggaggctgctggtgaatattaaccaaggtcaccccagttatcggaggagcaaacaggggctaagtccactagggggaggctgctggtgaatattaaccaaggtcaccccagttatcggaggagcaaacaggggctaagtccac

SEQ ID NO: 48 - DNA, 220 bp, synthetic construct
  misc_feature 1..220: note = Synthetic: 3x_hSerpEnh_2mer_spacers_v8
  source 1..220: mol_type = other DNA
gggggaggctgctggtgaatattaaccaaggtcaccccagttatcggaggagcaaacaggggctaagtccaccagggggaggctgctggtgaatattaaccaaggtcaccccagttatcggaggagcaaacaggggctaagtccacttgggggaggctgctggtgaatattaaccaaggtcaccccagttatcggaggagcaaacaggggctaagtccac

SEQ ID NO: 49 - DNA, 220 bp, synthetic construct
  misc_feature 1..220: note = Synthetic: 3x_hSerpEnh_2mer_spacers_v9
  source 1..220: mol_type = other DNA
gggggaggctgctggtgaatattaaccaaggtcaccccagttatcggaggagcaaacaggggctaagtccacctgggggaggctgctggtgaatattaaccaaggtcaccccagttatcggaggagcaaacaggggctaagtccacaagggggaggctgctggtgaatattaaccaaggtcaccccagttatcggaggagcaaacaggggctaagtccac

SEQ ID NO: 50 - DNA, 220 bp, synthetic construct
  misc_feature 1..220: note = Synthetic: 3x_hSerpEnh_2mer_spacers_v10
  source 1..220: mol_type = other DNA
gggggaggctgctggtgaatattaaccaaggtcaccccagttatcggaggagcaaacaggggctaagtccacctgggggaggctgctggtgaatattaaccaaggtcaccccagttatcggaggagcaaacaggggctaagtccaccagggggaggctgctggtgaatattaaccaaggtcaccccagttatcggaggagcaaacaggggctaagtccac

SEQ ID NO: 51 - DNA, 220 bp, synthetic construct
  misc_feature 1..220: note = Synthetic: 3x_hSerpEnh_2mer_spacers_v11
  source 1..220: mol_type = other DNA
gggggaggctgctggtgaatattaaccaaggtcaccccagttatcggaggagcaaacaggggctaagtccacctgggggaggctgctggtgaatattaaccaaggtcaccccagttatcggaggagcaaacaggggctaagtccactagggggaggctgctggtgaatattaaccaaggtcaccccagttatcggaggagcaaacaggggctaagtccac

SEQ ID NO: 52 - DNA, 220 bp, synthetic construct
  misc_feature 1..220: note = Synthetic: 3x_hSerpEnh_2mer_spacers_v12
  source 1..220: mol_type = other DNA
gggggaggctgctggtgaatattaaccaaggtcaccccagttatcggaggagcaaacaggggctaagtccacctgggggaggctgctggtgaatattaaccaaggtcaccccagttatcggaggagcaaacaggggctaagtccacttgggggaggctgctggtgaatattaaccaaggtcaccccagttatcggaggagcaaacaggggctaagtccac

SEQ ID NO: 53 - DNA, 220 bp, synthetic construct
  misc_feature 1..220: note = Synthetic: 3x_hSerpEnh_2mer_spacers_v13
  source 1..220: mol_type = other DNA
gggggaggctgctggtgaatattaaccaaggtcaccccagttatcggaggagcaaacaggggctaagtccactagggggaggctgctggtgaatattaaccaaggtcaccccagttatcggaggagcaaacaggggctaagtccacaagggggaggctgctggtgaatattaaccaaggtcaccccagttatcggaggagcaaacaggggctaagtccac

SEQ ID NO: 54 - DNA, 220 bp, synthetic construct
  misc_feature 1..220: note = Synthetic: 3x_hSerpEnh_2mer_spacers_v14
  source 1..220: mol_type = other DNA
gggggaggctgctggtgaatattaaccaaggtcaccccagttatcggaggagcaaacaggggctaagtccactagggggaggctgctggtgaatattaaccaaggtcaccccagttatcggaggagcaaacaggggctaagtccaccagggggaggctgctggtgaatattaaccaaggtcaccccagttatcggaggagcaaacaggggctaagtccac

SEQ ID NO: 55 - DNA, 220 bp, synthetic construct
  misc_feature 1..220: note = Synthetic: 3x_hSerpEnh_2mer_spacers_v15
  source 1..220: mol_type = other DNA
gggggaggctgctggtgaatattaaccaaggtcaccccagttatcggaggagcaaacaggggctaagtccactagggggaggctgctggtgaatattaaccaaggtcaccccagttatcggaggagcaaacaggggctaagtccacctgggggaggctgctggtgaatattaaccaaggtcaccccagttatcggaggagcaaacaggggctaagtccac

SEQ ID NO: 56 - DNA, 220 bp, synthetic construct
  misc_feature 1..220: note = Synthetic: 3x_hSerpEnh_2mer_spacers_v16
  source 1..220: mol_type = other DNA
gggggaggctgctggtgaatattaaccaaggtcaccccagttatcggaggagcaaacaggggctaagtccactagggggaggctgctggtgaatattaaccaaggtcaccccagttatcggaggagcaaacaggggctaagtccacttgggggaggctgctggtgaatattaaccaaggtcaccccagttatcggaggagcaaacaggggctaagtccac

SEQ ID NO: 57 - DNA, 220 bp, synthetic construct
  misc_feature 1..220: note = Synthetic: 3x_hSerpEnh_2mer_spacers_v17
  source 1..220: mol_type = other DNA
gggggaggctgctggtgaatattaaccaaggtcaccccagttatcggaggagcaaacaggggctaagtccacttgggggaggctgctggtgaatattaaccaaggtcaccccagttatcggaggagcaaacaggggctaagtccacaagggggaggctgctggtgaatattaaccaaggtcaccccagttatcggaggagcaaacaggggctaagtccac

SEQ ID NO: 58 - DNA, 220 bp, synthetic construct
  misc_feature 1..220: note = Synthetic: 3x_hSerpEnh_2mer_spacers_v18
  source 1..220: mol_type = other DNA
gggggaggctgctggtgaatattaaccaaggtcaccccagttatcggaggagcaaacaggggctaagtccacttgggggaggctgctggtgaatattaaccaaggtcaccccagttatcggaggagcaaacaggggctaagtccaccagggggaggctgctggtgaatattaaccaaggtcaccccagttatcggaggagcaaacaggggctaagtccac

SEQ ID NO: 59 - DNA, 220 bp, synthetic construct
  misc_feature 1..220: note = Synthetic: 3x_hSerpEnh_2mer_spacers_v19
  source 1..220: mol_type = other DNA
gggggaggctgctggtgaatattaaccaaggtcaccccagttatcggaggagcaaacaggggctaagtccacttgggggaggctgctggtgaatattaaccaaggtcaccccagttatcggaggagcaaacaggggctaagtccacctgggggaggctgctggtgaatattaaccaaggtcaccccagttatcggaggagcaaacaggggctaagtccac

SEQ ID NO: 60 - DNA, 220 bp, synthetic construct
  misc_feature 1..220: note = Synthetic: 3x_hSerpEnh_2mer_spacers_v20
  source 1..220: mol_type = other DNA
gggggaggctgctggtgaatattaaccaaggtcaccccagttatcggaggagcaaacaggggctaagtccacttgggggaggctgctggtgaatattaaccaaggtcaccccagttatcggaggagcaaacaggggctaagtccactagggggaggctgctggtgaatattaaccaaggtcaccccagttatcggaggagcaaacaggggctaagtccac

SEQ ID NO: 61 - DNA, 222 bp, synthetic construct
  misc_feature 1..222: note = Synthetic: 3x_hSerpEnh_3mer_spacers_v1
  source 1..222: mol_type = other DNA
gggggaggctgctggtgaatattaaccaaggtcaccccagttatcggaggagcaaacaggggctaagtccacttagggggaggctgctggtgaatattaaccaaggtcaccccagttatcggaggagcaaacaggggctaagtccactgtgggggaggctgctggtgaatattaaccaaggtcaccccagttatcggaggagcaaacaggggctaagtccac

SEQ ID NO: 62 - DNA, 222 bp, synthetic construct
  misc_feature 1..222: note = Synthetic: 3x_hSerpEnh_3mer_spacers_v2
  source 1..222: mol_type = other DNA
gggggaggctgctggtgaatattaaccaaggtcaccccagttatcggaggagcaaacaggggctaagtccacagagggggaggctgctggtgaatattaaccaaggtcaccccagttatcggaggagcaaacaggggctaagtccactgagggggaggctgctggtgaatattaaccaaggtcaccccagttatcggaggagcaaacaggggctaagtccac

SEQ ID NO: 63 - DNA, 222 bp, synthetic construct
  misc_feature 1..222: note = Synthetic: 3x_hSerpEnh_3mer_spacers_v3
  source 1..222: mol_type = other DNA
gggggaggctgctggtgaatattaaccaaggtcaccccagttatcggaggagcaaacaggggctaagtccacactgggggaggctgctggtgaatattaaccaaggtcaccccagttatcggaggagcaaacaggggctaagtccaccaagggggaggctgctggtgaatattaaccaaggtcaccccagttatcggaggagcaaacaggggctaagtccac

SEQ ID NO: 64 - DNA, 226 bp, synthetic construct
  misc_feature 1..226: note = Synthetic: 3x_hSerpEnh_5mer_spacers_v1
  source 1..226: mol_type = other DNA
gggggaggctgctggtgaatattaaccaaggtcaccccagttatcggaggagcaaacaggggctaagtccacacatagggggaggctgctggtgaatattaaccaaggtcaccccagttatcggaggagcaaacaggggctaagtccacctgtagggggaggctgctggtgaatattaaccaaggtcaccccagttatcggaggagcaaacaggggctaagtccac

SEQ ID NO: 65 - DNA, 226 bp, synthetic construct
  misc_feature 1..226: note = Synthetic: 3x_hSerpEnh_5mer_spacers_v2
  source 1..226: mol_type = other DNA
gggggaggctgctggtgaatattaaccaaggtcaccccagttatcggaggagcaaacaggggctaagtccacaacaagggggaggctgctggtgaatattaaccaaggtcaccccagttatcggaggagcaaacaggggctaagtccaccatcagggggaggctgctggtgaatattaaccaaggtcaccccagttatcggaggagcaaacaggggctaagtccac

SEQ ID NO: 66 - DNA, 226 bp, synthetic construct
  misc_feature 1..226: note = Synthetic: 3x_hSerpEnh_5mer_spacers_v3
  source 1..226: mol_type = other DNA
gggggaggctgctggtgaatattaaccaaggtcaccccagttatcggaggagcaaacaggggctaagtccaccaattgggggaggctgctggtgaatattaaccaaggtcaccccagttatcggaggagcaaacaggggctaagtccacttgctgggggaggctgctggtgaatattaaccaaggtcaccccagttatcggaggagcaaacaggggctaagtccac

SEQ ID NO: 67 - DNA, 238 bp, synthetic construct
  misc_feature 1..238: note = Synthetic: 3x_hSerpEnh_11mer_spacers_v1
  source 1..238: mol_type = other DNA
gggggaggctgctggtgaatattaaccaaggtcaccccagttatcggaggagcaaacaggggctaagtccacccttgggaccagggggaggctgctggtgaatattaaccaaggtcaccccagttatcggaggagcaaacaggggctaagtccacaagctgttccagggggaggctgctggtgaatattaaccaaggtcaccccagttatcggaggagcaaacaggggctaagtccac

SEQ ID NO: 68 - DNA, 238 bp, synthetic construct
  misc_feature 1..238: note = Synthetic: 3x_hSerpEnh_11mer_spacers_v2
  source 1..238: mol_type = other DNA
gggggaggctgctggtgaatattaaccaaggtcaccccagttatcggaggagcaaacaggggctaagtccacaggctggttgagggggaggctgctggtgaatattaaccaaggtcaccccagttatcggaggagcaaacaggggctaagtccactgataatagctgggggaggctgctggtgaatattaaccaaggtcaccccagttatcggaggagcaaacaggggctaagtccac

SEQ ID NO: 69 - DNA, 238 bp, synthetic construct
  misc_feature 1..238: note = Synthetic: 3x_hSerpEnh_11mer_spacers_v3
  source 1..238: mol_type = other DNA
gggggaggctgctggtgaatattaaccaaggtcaccccagttatcggaggagcaaacaggggctaagtccaccattctgctttgggggaggctgctggtgaatattaaccaaggtcaccccagttatcggaggagcaaacaggggctaagtccacttgattaagaagggggaggctgctggtgaatattaaccaaggtcaccccagttatcggaggagcaaacaggggctaagtccac

SEQ ID NO: 70 - DNA, 238 bp, synthetic construct
  misc_feature 1..238: note = Synthetic: 3x_hSerpEnh_11mer_spacers_HNF4former_spacers_FOXAfor
  source 1..238: mol_type = other DNA
gggggaggctgctggtgaatattaaccaaggtcaccccagttatcggaggagcaaacaggggctaagtccacaacaaagtccagggggaggctgctggtgaatattaaccaaggtcaccccagttatcggaggagcaaacaggggctaagtccaccttgtaaacaagggggaggctgctggtgaatattaaccaaggtcaccccagttatcggaggagcaaacaggggctaagtccac

SEQ ID NO: 71 - DNA, 238 bp, synthetic construct
  misc_feature 1..238: note = Synthetic: 3x_hSerpEnh_11mer_spacers_HNF4former_spacers_FOXArev
  source 1..238: mol_type = other DNA
gggggaggctgctggtgaatattaaccaaggtcaccccagttatcggaggagcaaacaggggctaagtccactgcaaagtcctgggggaggctgctggtgaatattaaccaaggtcaccccagttatcggaggagcaaacaggggctaagtccacagtgtttacaagggggaggctgctggtgaatattaaccaaggtcaccccagttatcggaggagcaaacaggggctaagtccac

SEQ ID NO: 72 - DNA, 238 bp, synthetic construct
  misc_feature 1..238: note = Synthetic: 3x_hSerpEnh_11mer_spacers_HNF4revmer_spacers_FOXAfor
  source 1..238: mol_type = other DNA
gggggaggctgctggtgaatattaaccaaggtcaccccagttatcggaggagcaaacaggggctaagtccacaggactttgaagggggaggctgctggtgaatattaaccaaggtcaccccagttatcggaggagcaaacaggggctaagtccacagtgtaaacaagggggaggctgctggtgaatattaaccaaggtcaccccagttatcggaggagcaaacaggggctaagtccac

SEQ ID NO: 73 - DNA, 238 bp, synthetic construct
  misc_feature 1..238: note = Synthetic: 3x_hSerpEnh_11mer_spacers_HNF4revmer_spacers_FOXArev
  source 1..238: mol_type = other DNA
gggggaggctgctggtgaatattaaccaaggtcaccccagttatcggaggagcaaacaggggctaagtccactggactttggtgggggaggctgctggtgaatattaaccaaggtcaccccagttatcggaggagcaaacaggggctaagtccactctgtttacaagggggaggctgctggtgaatattaaccaaggtcaccccagttatcggaggagcaaacaggggctaagtccac

SEQ ID NO: 74 - DNA, 276 bp, synthetic construct
  misc_feature 1..276: note = Synthetic: 3x_hSerpEnh_30mer_spacers_v1
  source 1..276: mol_type = other DNA
gggggaggctgctggtgaatattaaccaaggtcaccccagttatcggaggagcaaacaggggctaagtccacctgcttgacatctgcagtaatctttgattagggggaggctgctggtgaatattaaccaaggtcaccccagttatcggaggagcaaacaggggctaagtccacctctgatactttgatatctagtctactgctgggggaggctgctggtgaatattaaccaaggtcaccccagttatcggaggagcaaacaggggctaagtccac

SEQ ID NO: 75 - DNA, 276 bp, synthetic construct
  misc_feature 1..276: note = Synthetic: 3x_hSerpEnh_30mer_spacers_v2
  source 1..276: mol_type = other DNA
gggggaggctgctggtgaatattaaccaaggtcaccccagttatcggaggagcaaacaggggctaagtccaccacttgtatttaatcataactacttagcaagggggaggctgctggtgaatattaaccaaggtcaccccagttatcggaggagcaaacaggggctaagtccactaacatcttacaaactaaagttagatagtagggggaggctgctggtgaatattaaccaaggtcaccccagttatcggaggagcaaacaggggctaagtccac

SEQ ID NO: 76 - DNA, 276 bp, synthetic construct
  misc_feature 1..276: note = Synthetic: 3x_hSerpEnh_30mer_spacers_v3
  source 1..276: mol_type = other DNA
gggggaggctgctggtgaatattaaccaaggtcaccccagttatcggaggagcaaacaggggctaagtccacatagaagaatttcttacattgtgtgaacctgggggaggctgctggtgaatattaaccaaggtcaccccagttatcggaggagcaaacaggggctaagtccacattgaagtgcaaagtcactaatattaagcagggggaggctgctggtgaatattaaccaaggtcaccccagttatcggaggagcaaacaggggctaagtccac

SEQ ID NO: 77 - DNA, 276 bp, synthetic construct
  misc_feature 1..276: note = Synthetic: 3x_hSerpEnh_30mer_spacers_HNF4former_spacers_FOXAfor
  source 1..276: mol_type = other DNA
gggggaggctgctggtgaatattaaccaaggtcaccccagttatcggaggagcaaacaggggctaagtccacataattaaagtcaaagtcctcactgctagtgggggaggctgctggtgaatattaaccaaggtcaccccagttatcggaggagcaaacaggggctaagtccacacaattagagctgtaaacataatttgtgtagggggaggctgctggtgaatattaaccaaggtcaccccagttatcggaggagcaaacaggggctaagtccac

SEQ ID NO: 78 - DNA, 276 bp, synthetic construct
  misc_feature 1..276: note = Synthetic: 3x_hSerpEnh_30mer_spacers_HNF4former_spacers_FOXArev
  source 1..276: mol_type = other DNA
gggggaggctgctggtgaatattaaccaaggtcaccccagttatcggaggagcaaacaggggctaagtccacttatttgcactcaaagtccactttattacagggggaggctgctggtgaatattaaccaaggtcaccccagttatcggaggagcaaacaggggctaagtccactcaatcataagtgtttacaagtttaagattgggggaggctgctggtgaatattaaccaaggtcaccccagttatcggaggagcaaacaggggctaagtccac

SEQ ID NO: 79 - DNA, 276 bp, synthetic construct
  misc_feature 1..276: note = Synthetic: 3x_hSerpEnh_30mer_spacers_HNF4revmer_spacers_FOXAfor
  source 1..276: mol_type = other DNA
gggggaggctgctggtgaatattaaccaaggtcaccccagttatcggaggagcaaacaggggctaagtccacagttgctgtgtggactttgtcactgcaagagggggaggctgctggtgaatattaaccaaggtcaccccagttatcggaggagcaaacaggggctaagtccacaacagcatatttgtaaacagttctattagtgggggaggctgctggtgaatattaaccaaggtcaccccagttatcggaggagcaaacaggggctaagtccac

SEQ ID NO: 80 - DNA, 276 bp, synthetic construct
  misc_feature 1..276: note = Synthetic: 3x_hSerpEnh_30mer_spacers_HNF4revmer_spacers_FOXArev
  source 1..276: mol_type = other DNA
gggggaggctgctggtgaatattaaccaaggtcaccccagttatcggaggagcaaacaggggctaagtccacattaactattgggactttggttaacaacaagggggaggctgctggtgaatattaaccaaggtcaccccagttatcggaggagcaaacaggggctaagtccaccagagacttattgtttacagctaactatctgggggaggctgctggtgaatattaaccaaggtcaccccagttatcggaggagcaaacaggggctaagtccac

SEQ ID NO: 81 - DNA, 72 bp, Homo sapiens
  misc_feature 1..72: note = human SERPIN1A enhancer
  source 1..72: mol_type = genomic DNA
gggggaggctgctggtgaatattaaccaaggtcaccccagttatcggaggagcaaacaggggctaagtccac

SEQ ID NO: 82 - DNA, 69 bp, unidentified
  misc_feature 1..69: note = Chinese Tree Shrew SERPINA1
  source 1..69: mol_type = unassigned DNA
ggaggctgttggtgaatattaaccaaggtcaccccagttatcggaggagcaaacaagggctaagtccac

SEQ ID NO: 83 - DNA, 70 bp, unidentified
  misc_feature 1..70: note = Bushbaby SERPINA1 enhancer
  source 1..70: mol_type = unassigned DNA
gggggaagctactggtgaatattaaccaaggtcacccagttatcagggagcaaacaggagctaagtccat

SEQ ID NO: 84 - DNA, 72 bp, unidentified
  misc_feature 1..72: note = HNF4 enhancer
  source 1..72: mol_type = unassigned DNA
gagggaggctgctggtgaatattaaccaaggtcacctcagttatcagaggagcaaacaggggcaaagtccat

SEQ ID NO: 85 - DNA, 72 bp, unidentified
  misc_feature 1..72: note = HNF4_FOXA enhancer
  source 1..72: mol_type = unassigned DNA
gggggaggctgctggtaaacattaaccaaggtcaccccagttatcagaggagcaaacaggggcaaagtccac

SEQ ID NO: 86 - DNA, 72 bp, synthetic construct
  misc_feature 1..72: note = Synthetic: hSerpEnh_FOXA_ consensus_v1
  source 1..72: mol_type = other DNA
aggggaggctgctggtaaacattaaccaaggtcaccccagttatcagaggagcaaacaggggctaagtccac

SEQ ID NO: 87 - DNA, 72 bp, synthetic construct
  misc_feature 1..72: note = Synthetic: hSerpEnh_FOXA_ consensus_v2
  source 1..72: mol_type = other DNA
aggggaggctgctggtaaatattaaccaaggtcaccccagttatcagaggagcaaacaggggctaagtccat

SEQ ID NO: 88 - DNA, 72 bp, synthetic construct; identical to SEQ ID NO: 85
  misc_feature 1..72: note = Synthetic: hSerpEnh_FOXA_HNF4_consensus_v1
  source 1..72: mol_type = other DNA

SEQ ID NO: 89 - DNA, 72 bp, synthetic construct
  misc_feature 1..72: note = Synthetic: hSerpEnh_FOXA_HNF4_consensus_v2
  source 1..72: mol_type = other DNA
aggggaggctgctggtaaatattaaccaaggtcaccccagttatcagaggagcaaacaggggcaaagtccac

SEQ ID NO: 90 - DNA, 73 bp, synthetic construct
  misc_feature 1..73: note = Synthetic: hSerpEnh_HNF1_ consensus_v1
  source 1..73: mol_type = other DNA
aggggaggctgctggttaatgattaactaaggtcaccccagttatcagaggagcaaacaggggctaagtccac

SEQ ID NO: 91 - DNA, 73 bp, synthetic construct
  misc_feature 1..73: note = Synthetic: hSerpEnh_HNF1_ consensus_v2
  source 1..73: mol_type = other DNA
aggggaggctgctggttaatcattaactaaggtcaccccagttatcagaggagcaaacaggggctaagtccac

SEQ ID NO: 92 - DNA, 73 bp, synthetic construct
  misc_feature 1..73: note = Synthetic: hSerpEnh_HNF1_HNF4_consensus_v1
  source 1..73: mol_type = other DNA
gggggaggctgctggttaatgattaactaaggtcaccccagttatcagaggagcaaacaggggcaaagtccac

SEQ ID NO: 93 - DNA, 73 bp, synthetic construct
  misc_feature 1..73: note = Synthetic: hSerpEnh_HNF1_HNF4_consensus_v2
  source 1..73: mol_type = other DNA
gggggaggctgctggttaatcattaactaaggtcaccccagttatcagaggagcaaacaggggcaaagtccac

SEQ ID NO: 94 - DNA, 72 bp, synthetic construct
  misc_feature 1..72: note = Synthetic: hSerpEnh_HNF4_ consensus_v1
  source 1..72: mol_type = other DNA
aggggaggctgctggtgaatattaaccaaggtcaccccagttatcagaggagcaaacaggggcaaagtccat

SEQ ID NO: 95 - DNA, 72 bp, synthetic construct
  misc_feature 1..72: note = Synthetic: hSerpEnh_HNF4_ consensus_v2
  source 1..72: mol_type = other DNA
aggggaggctgctggtgaatattaaccaaggtcacctcagttatcagaggagcaaacaggggcaaagtccac

SEQ ID NO: 96 - DNA, 72 bp, synthetic construct
  misc_feature 1..72: note = Synthetic: hSerpEnh_human_SNPs_v1
  source 1..72: mol_type = other DNA
agaggaggctgctggtgaatattaactaaggtcaccccagttatcagaggagcaaacaggggctaagtccac

SEQ ID NO: 97 - DNA, 72 bp, synthetic construct
  misc_feature 1..72: note = Synthetic: hSerpEnh_human_SNPS_v2
  source 1..72: mol_type = other DNA
agagaaggctgctggtgaatattaactaaggtcaccccagttatcggaggagcaaacaggggctaagtccac

SEQ ID NO: 98 - DNA, 72 bp, synthetic construct
  misc_feature 1..72: note = Synthetic: hSerpEnh_low_TFBS_ and_end_regions_v1
  source 1..72: mol_type = other DNA
gggggaggctgctggtgaatattaaccaaggtcagcacagttatcagaggagcaaacaggggctaagtccat

SEQ ID NO: 99 - DNA, 72 bp, synthetic construct
  misc_feature 1..72: note = Synthetic: hSerpEnh_low_TFBS_ and_end_regions_v2
  source 1..72: mol_type = other DNA
gggggaggctgctggtgaatattaaccaaggtcaactcagttatcagaggagcaaacaggggctaagtccat

SEQ ID NO: 100 - DNA, 72 bp, synthetic construct
  misc_feature 1..72: note = Synthetic: hSerpEnh_low_TFBS_ and_end_regions_v3
  source 1..72: mol_type = other DNA
aggggaggctgctggtgaatattaaccaaggtcacctcagttatcagaggagcaaacaggggctaagtccat

SEQ ID NO: 101 - DNA, 72 bp, synthetic construct
  misc_feature 1..72: note = Synthetic: hSerpEnh_low_TFBS_ and_end_regions_v4
  source 1..72: mol_type = other DNA
aggggaggctgctggtgaatattaaccaaggtcagcccagttattggaggagcaaacaggggctaagtccat

SEQ ID NO: 102 - DNA, 72 bp, synthetic construct
  misc_feature 1..72: note = Synthetic: hSerpEnh_low_TFBS_ and_end_regions_v5
  source 1..72: mol_type = other DNA
aggggaggctgctggtgaatattaaccaaggtcaccccagttattagaggagcaaacaggggctaagtccat

SEQ ID NO: 103 - DNA, 72 bp, synthetic construct
  misc_feature 1..72: note = Synthetic: hSerpEnh_low_TFBS_ and_end_regions_v6
  source 1..72: mol_type = other DNA
aggggaggctgctggtgaatattaaccaaggtcaccccagttactggaggagcaaacaggggctaagtccat

SEQ ID NO: 104 - DNA, 72 bp, synthetic construct
  misc_feature 1..72: note = Synthetic: hSerpEnh_low_TFBS_ region_v1
  source 1..72: mol_type = other DNA
gggggaggctgctggtgaatattaaccaaggtcagcacagttaccagaggagcaaacaggggctaagtccac

SEQ ID NO: 105 - DNA, 72 bp, synthetic construct
  misc_feature 1..72: note = Synthetic: hSerpEnh_low_TFBS_ region_v2
  source 1..72: mol_type = other DNA
gggggaggctgctggtgaatattaaccaaggtcaactcagttaccagaggagcaaacaggggctaagtccac

SEQ ID NO: 106 - DNA, 72 bp, synthetic construct
  misc_feature 1..72: note = Synthetic: hSerpEnh_low_TFBS_ region_v3
  source 1..72: mol_type = other DNA
gggggaggctgctggtgaatattaaccaaggtcaccccagttactaggggagcaaacaggggctaagtccac

SEQ ID NO: 107 - DNA, 72 bp, synthetic construct
  misc_feature 1..72: note = Synthetic: hSerpEnh_low_TFBS_ region_v4
  source 1..72: mol_type = other DNA
gggggaggctgctggtgaatattaaccaaggtcaccccagttactagaggaacaaacaggggctaagtccac

SEQ ID NO: 108 - DNA, 72 bp, synthetic construct
  misc_feature 1..72: note = Synthetic: hSerpEnh_low_TFBS_ region_v5
  source 1..72: mol_type = other DNA
gggggaggctgctggtgaatattaaccaaggtcaccccagttattaggggaacaaacaggggctaagtccac

SEQ ID NO: 109 - DNA, 72 bp, synthetic construct
  misc_feature 1..72: note = Synthetic: hSerpEnh_11_NHP_ consensus_v1
  source 1..72: mol_type = other DNA
gggggaggctgctggtgaatattaaccaaggtcaccccagttaccagaggagcaaacagggactaagttcac

SEQ ID NO: 110 - DNA, 72 bp, synthetic construct
  misc_feature 1..72: note = Synthetic: hSerpEnh_11_NHP_ consensus_v2
  source 1..72: mol_type = other DNA
gggggaggctgctggtgaatattaaccaaggtcaccccagttaccggaggagcaaacagggactaagttcat

SEQ ID NO: 111 - DNA, 72 bp, synthetic construct
  misc_feature 1..72: note = Synthetic: hSerpEnh_100_vertebrate_consensus_v1
  source 1..72: mol_type = other DNA
gggggaggctgctggtgaatattaaccaagatcaccccagttatcagaggagcaaacagggactaagtccat

SEQ ID NO: 112 - DNA, 72 bp, synthetic construct
  misc_feature 1..72: note = Synthetic: hSerpEnh_100_vertebrate_consensus_v2
  source 1..72: mol_type = other DNA
gggggaggctgctggtgaatattaaccaaggtcaccccagttaccagaggagcaaacagggactaagtccat

SEQ ID NO: 113 - DNA, 72 bp, synthetic construct
  misc_feature 1..72: note = Synthetic: hSerpEnh_100_vertebrate_consensus_v3
  source 1..72: mol_type = other DNA
gggggaggctgctggtgaatattaaccaaggtcaccccagttatcagaggagcaaacagggactaagttcat

SEQ ID NO: 114 - DNA, 72 bp, synthetic construct
  misc_feature 1..72: note = Synthetic: hSerpEnh_100_vertebrate_consensus_v4
  source 1..72: mol_type = other DNA
aggggaggctgctggtgaatattaaccaaggtcaccccagttatcagaggagcaaacagggactaagtccat

SEQ ID NO: 115 - DNA, 72 bp, synthetic construct
  misc_feature 1..72: note = Synthetic: hSerpEnh_end_regions_ v1
  source 1..72: mol_type = other DNA
aagggaggctgctggtgaatattaaccaaggtcaccccagttatcggaggagcaaacaggggctaagttcat

SEQ ID NO: 116 - DNA, 72 bp, synthetic construct
  misc_feature 1..72: note = Synthetic: hSerpEnh_end_regions_ v2
  source 1..72: mol_type = other DNA
aagggaggctgctggtgaatattaaccaaggtcaccccagttatcggaggagcaaacagggactaagtccat

SEQ ID NO: 117 - DNA, 72 bp, unidentified
  misc_feature 1..72: note = SerpEnh_Rhesus
  source 1..72: mol_type = unassigned DNA
gggggaggctgctggtgaatattaaccaagatcaccccagttaccggaggagcaaacagggactaagttcac

SEQ ID NO: 118 - DNA, 71 bp, unidentified
  misc_feature 1..71: note = SerpEnh_Squirrel_monkey
  source 1..71: mol_type = unassigned DNA
gggggatgctgctggtgaatattaaccaaggtcagcccagttaccggaggagcaaacagggctaagtccac

SEQ ID NO: 119 - DNA, 72 bp, unidentified
  misc_feature 1..72: note = SerpEnh_Bactrian_camel
  source 1..72: mol_type = unassigned DNA
gggggaggctgctggtgaatattaaccaaggtcacctcagttatcggaggagcaaacaaggactaagtccat

SEQ ID NO: 120 - DNA, 72 bp, unidentified
  misc_feature 1..72: note = SerpEnh_Ferret
  source 1..72: mol_type = unassigned DNA
gggggaggttgctggtgaatattaactaaggtcaccccagttatcggaggagcaaacagggactaagtccag

SEQ ID NO: 121 - DNA, 70 bp, unidentified
  misc_feature 1..70: note = SerpEnh_Mouse_lemur
  source 1..70: mol_type = unassigned DNA
gagggagggcgctggtgaatattaaccaaggtcacccagttatcggggagcaaacaggggctaagtccat

SEQ ID NO: 122 - DNA, 69 bp, unidentified
  misc_feature 1..69: note = Chinese Tree Shrew SERPINA1 enhancer
  source 1..69: mol_type = unassigned DNA
ggaggctgttggtgaatattaaccaaggtcacctcagttatcggaggagcaaacaagggctaagtccac

SEQ ID NO: 123 - DNA, 76 bp, unidentified
  misc_feature 1..76: note = SerpEnh_Prairie_vole
  source 1..76: mol_type = unassigned DNA
gggggagtctgctagtgaatattaaccaaggtcagcacagttatcggaggagcaaacagagagggactaagtccat

SEQ ID NO: 124 - DNA, 72 bp, unidentified
  misc_feature 1..72: note = SerpEnh_Cat
  source 1..72: mol_type = unassigned DNA
gggggaggctgctggtgaatattaactaaggtcaccccagttatcagaggagcaaatagggactaagtccat

SEQ ID NO: 125 - DNA, 72 bp, unidentified
  misc_feature 1..72: note = SerpEnh_Panda
  source 1..72: mol_type = unassigned DNA
gggggaggttgctggtgaatattaactaaggtcaccccagttatcagaggagcaaacagggactaagtccag

SEQ ID NO: 126 - DNA, 72 bp, unidentified
  misc_feature 1..72: note = SerpEnh_David's_myotis
  source 1..72: mol_type = unassigned DNA
gggggaggctgctggtgaatattaaccaaggtcaactcagttatcagaggagcaaacagggactaagtccat

SEQ ID NO: 127 - DNA, 70 bp, unidentified
  misc_feature 1..70: note = SerpEnh_Coquerel's_sifaka
  source 1..70: mol_type = unassigned DNA
gagggagggcactggtgaatattaaccaaggtcacccagttatcggggagcaaacaggggctaagtccat

SEQ ID NO: 128 - DNA, 72 bp, unidentified
  misc_feature 1..72: note = SerpEnh_Dog
  source 1..72: mol_type = unassigned DNA
gggggtggttgctggtgaatattaaccaaagtcaccccggttatcggaggagcaaacagggactaagtccat

SEQ ID NO: 129 - DNA, 71 bp, unidentified
  misc_feature 1..71: note = SerpEnh_Armadillo
  source 1..71: mol_type = unassigned DNA
gggggaggctgcgagtgaacattaaccaaggtcacccagttatcagaggagcaaacagggactaagtccac

SEQ ID NO: 130 - DNA, 72 bp, unidentified
  misc_feature 1..72: note = SerpEnh_Dolphin
  source 1..72: mol_type = unassigned DNA
gtgggaggctgctggtgaatattaaccaaggtcaccccagttatcagaggagtaaacagggactaagctcac

SEQ ID NO: 131 - DNA, 70 bp, unidentified; identical to SEQ ID NO: 83
  misc_feature 1..70: note = SerpEnh_Bushbaby
  source 1..70: mol_type = unassigned DNA

SEQ ID NO: 132 - DNA, 75 bp, unidentified
  misc_feature 1..75: note = SerpEnh_Lesser_Egyptian_jerboa
  source 1..75: mol_type = unassigned DNA
ggggaatctgctagtgaatattaaccaaggtccccgcagttattggaggagcaaacaggcagggactaagtccaa

SEQ ID NO: 133 - DNA, 71 bp, unidentified
  misc_feature 1..71: note = SerpEnh_Rabbit
  source 1..71: mol_type = unassigned DNA
ggggcagctgcaggtgaatattaaccaaggtcacgccagttatcggaggagcaaacaggagttaagtccac

SEQ ID NO: 134 - DNA, 72 bp, unidentified
  misc_feature 1..72: note = SerpEnh_Tibetan_antelope
  source 1..72: mol_type = unassigned DNA
gggggaggctgctggtaaacattaaccaaggtcaccccagttatcagaggaacaaacaaggactaagtccat

SEQ ID NO: 135 - DNA, 71 bp, unidentified
  misc_feature 1..71: note = SerpEnh_Big_brown_bat
  source 1..71: mol_type = unassigned DNA
gggggaggctgctggtgaatattaaccagggtcaactcagttatcagaggagcaaacaggactaagtccat

SEQ ID NO: 136 - DNA, 72 bp, unidentified
  misc_feature 1..72: note = SerpEnh_Starnosed_mole
  source 1..72: mol_type = unassigned DNA
tggggaggctgctggtgaatattaactaaggtcactccagttatctggggagcaaacagggactaagtccat

SEQ ID NO: 137 - DNA, 72 bp, Homo sapiens; identical to SEQ ID NO: 81
  misc_feature 1..72: note = hSerpEnh
  source 1..72: mol_type = genomic DNA

SEQ ID NO: 138 - DNA, 218 bp, synthetic construct
  misc_feature 1..218: note = Synthetic: 3x_Tibetan_antelope_SERPINA1_enhancer
  source 1..218: mol_type = other DNA
gggggaggctgctggtaaacattaaccaaggtcaccccagttatcagaggaacaaacaaggactaagtccattgggggaggctgctggtaaacattaaccaaggtcaccccagttatcagaggaacaaacaaggactaagtccattgggggaggctgctggtaaacattaaccaaggtcaccccagttatcagaggaacaaacaaggactaagtccat

SEQ ID NO: 139 - DNA, 215 bp, synthetic construct
  misc_feature 1..215: note = Synthetic: 3x_Armadillo_CpGmin_SERPINA1_enhancer
  source 1..215: mol_type = other DNA
gggggaggctgctagtgaacattaaccaaggtcacccagttatcagaggagcaaacagggactaagtccactgggggaggctgctagtgaacattaaccaaggtcacccagttatcagaggagcaaacagggactaagtccactgggggaggctgctagtgaacattaaccaaggtcacccagttatcagaggagcaaacagggactaagtccac

SEQ ID NO: 140 - DNA, 16 bp, synthetic construct
  misc_feature 1..16: note = Synthetic: duplex oligonucleotide
  source 1..16: mol_type = other DNA
gcgcgctcgctcgctc

SEQ ID NO: 141 - DNA, 21 bp, synthetic construct
  misc_feature 1..21: note = Synthetic: TTRm 5 UTR comprises
  source 1..21: mol_type = other DNA
acacagatccacaagctcctg

SEQ ID NO: 142 - protein, 2351 aa, synthetic construct
  REGION 1..2351: note = Synthetic: factor VIII protein (Coagulation factor VIII isoform) - preproprotein [Homo sapiens]; Accession number: NP_000123.1 (2351 aa)
MQIELSTCFFLCLLRFCFSATRRYYLGAVELSWDYMQSDLGELPVDARFPPRVPKSFPFNTSVVYKKTLFVEFTDHLFNIAKPRPPWMGLLGPTIQAEVYDTVVITLKNMASHPVSLHAVGVSYWKASEGAEYDDQTSQREKEDDKVFPGGSHTYVWQVLKENGPMASDPLCLTYSYLSHVDLVKDLNSGLIGALLVCREGSLAKEKTQTLHKFILLFAVFDEGKSWHSETKNSLMQDRDAASARAWPKMHTVNGYVNRSLPGLIGCHRKSVYWHVIGMGTTPEVHSIFLEGHTFLVRNHRQASLEISPITFLTAQTLLMDLGQFLLFCHISSHQHDGMEAYVKVDSCPEEPQLRMKNNEEAEDYDDDLTDSEMDVVRFDDDNSPSFIQIRSVAKKHPKTWVHYIAAEEEDWDYAPLVLAPDDRSYKSQYLNNGPQRIGRKYKKVRFMAYTDETFKTREAIQHESGILGPLLYGEVGDTLLIIFKNQASRPYNIYPHGITDVRPLYSRRLPKGVKHLKDFPILPGEIFKYKWTVTVEDGPTKSDPRCLTRYYSSFVNMERDLASGLIGPLLICYKESVDQRGNQIMSDKRNVILFSVFDENRSWYLTENIQRFLPNPAGVQLEDPEFQASNIMHSINGYVFDSLQLSVCLHEVAYWYILSIGAQTDFLSVFFSGYTFKHKMVYEDTLTLFPFSGETVFMSMENPGLWILGCHNSDFRNRGMTALLKVSSCDKNTGDYYEDSYEDISAYLLSKNNAIEPRSFSQNSRHPSTRQKQFNATTIPENDIEKTDPWFAHRTPMPKIQNVSSSDLLMLLRQSPTPHGLSLSDLQEAKYETFSDDPSPGAIDSNNSLSEMTHFRPQLHHSGDMVFTPESGLQLRLNEKLGTTAATELKKLDFKVSSTSNNLISTIPSDNLAAGTDNTSSLGPPSMPVHYDSQLDTTLFGKKSSPLTESGGPLSLSEENNDSKLLESGLMNSQESSWGKNVSSTESGRLFKGKRAHGPALLTKDNALFKVSISLLKTNKTSNNSATNRKTHIDGPSLLIENSPSVWQNILESDTEFKKVTPLIHDRMLMDKNATALRLNHMSNKTTSSKNMEMVQQKKEGPIPPDAQNPDMSFFKMLFLPESARWIQRTHGKNSLNSGQGPSPKQLVSLGPEKSVEGQNFLSEKNKVVVGKGEFTKDVGLKEMVFPSSRNLFLTNLDNLHENNTHNQEKKIQEEIEKKETLIQENVVLPQIHTVTGTKNFMKNLFLLSTRQNVEGSYDGAYAPVLQDFRSLNDSTNRTKKHTAHFSKKGEEENLEGLGNQTKQIVEKYACTTRISPNTSQQNFVTQRSKRALKQFRLPLEETELEKRIIVDDTSTQWSKNMKHLTPSTLTQIDYNEKEKGAITQSPLSDCLTRSHSIPQANRSPLPIAKVSSFPSIRPIYLTRVLFQDNSSHLPAASYRKKDSGVQESSHFLQGAKKNNLSLAILTLEMTGDQREVGSLGTSATNSVTYKKVENTVLPKPDLPKTSGKVELLPKVHIYQKDLFPTETSNGSPGHLDLVEGSLLQGTEGAIKWNEANRPGKVPFLRVATESSAKTPSKLLDPLAWDNHYGTQIPKEEWKSQEKSPEKTAFKKKDTILSLNACESNHAIAAINEGQNKPEIEVTWAKQGRTERLCSQNPPVLKRHQREITRTTLQSDQEEIDYDDTISVEMKKEDFDIYDEDENQSPRSFQKKTRHYFIAAVERLWDYGMSSSPHVLRNRAQSGSVPQFKKVVFQEFTDGSFTQPLYRGELNEHLGLLGPYIRAEVEDNIMVTFRNQASRPYSFYSSLISYEEDQRQGAEPRKNFVKPNETKTYFWKVQHHMAPTKDEFDCKAWAYFSDVDLEKDVHSGLIGPLLVCHTNTLNPAHGRQVTVQEFALFFTIFDETKSWYFTENMERNCRAPCNIQMEDPTFKENYRFHAINGYIMDTLPGLVMAQDQRIRWYLLSMGSNENIHSIHFSGHVFTVRKKEEYKMALYNLYPGVFETVEMLPSKAGIWRVECLIGEHLHAGMSTLFLVYSNKCQTPLGMASGHIRDFQITASGQYGQWAPKLARLHYSGSINAWSTKEPFSWIKVDLLAPMIIHGIKTQGARQKFSSLYISQFIIMYSLDGKKWQTYRGNSTGTLMVFFGNVDSSGIKHNIFNPPIIARYIRLHPTHYSIRSTLRMELMGCDLNSCSMPLGMESKAISDAQITASSYFTNMFATWSPSKARLHLQGRSNAWRPQVNNPKEWLQVDFQKTMKVTGVTTQGVKSLLTSMYVKEFLISSSQDGHQWTLFFQNGKVKVFQGNQDSFTPVVNSLDPPLLTRYLRIHPQSWVHQIALRMEVLGCEAQDLY

SEQ ID NO: 143 - DNA, 4392 bp, synthetic construct
  misc_feature 1..4392: note = Synthetic: ceDNA 1651 ORF sequence (GE-715; hFVIII-F309S-BD226seq124-BDD-F309)
  source 1..4392: mol_type = other DNA
atgcagattgagctgagcacctgcttcttcctgtgcctgctgaggttctgcttctctgccaccaggagatactacctgggggctgtggagctgagctgggactacatgcagtctgacctgggggagctgcctgtggatgccaggttcccccccagagtgcccaagagcttccccttcaacacctctgtggtgtacaagaagaccctgtttgtggagttcactgaccacctgttcaacattgccaagcccaggcccccctggatgggcctgctgggccccaccatccaggctgaggtgtatgacactgtggtgatcaccctgaagaacatggccagccaccctgtgagcctgcatgctgtgggggtgagctactggaaggcctctgagggggctgagtatgatgaccagaccagccagagggagaaggaggatgacaaggtgttccctgggggcagccacacctatgtgtggcaggtgctgaaggagaatggccccatggcctctgaccccctgtgcctgacctacagctacctgagccatgtggacctggtgaaggacctgaactctggcctgattggggccctgctggtgtgcagggagggcagcctggccaaggagaagacccagaccctgcacaagttcatcctgctgtttgctgtgtttgatgagggcaagagctggcactctgaaaccaagaacagcctgatgcaggacagggatgctgcctctgccagggcctggcccaagatgcacactgtgaatggctatgtgaacaggagcctgcctggcctgattggctgccacaggaagtctgtgtactggcatgtgattggcatgggcaccacccctgaggtgcacagcatcttcctggagggccacaccttcctggtcaggaaccacaggcaggccagcctggagatcagccccatcaccttcctgactgcccagaccctgctgatggacctgggccagttcctgctgttctgccacatcagcagccaccagcatgatggcatggaggcctatgtgaaggtggacagctgccctgaggagccccagctgaggatgaagaacaatgaggaggctgaggactatgatgatgacctgactgactctgagatggatgtggtgaggtttgatgatgacaacagccccagcttcatccagatcaggtctgtggccaagaagcaccccaagacctgggtgcactacattgctgctgaggaggaggactgggactatgcccccctggtgctggcccctgatgacaggagctacaagagccagtacctgaacaatggcccccagaggattggcaggaagtacaagaaggtcaggttcatggcctacactgatgaaaccttcaagaccagggaggccatccagcatgagtctggcatcctgggccccctgctgtatggggaggtgggggacaccctgctgatcatcttcaagaaccaggccagcaggccctacaacatctacccccatggcatcactgatgtgaggcccctgtacagcaggaggctgcccaagggggtgaagcacctgaaggacttccccatcctgcctggggagatcttcaagtacaagtggactgtgactgtggaggatggccccaccaagtctgaccccaggtgcctgaccagatactacagcagctttgtgaacatggagagggacctggcctctggcctgattggccccctgctgatctgctacaaggagtctgtggaccagaggggcaaccagatcatgtctgacaagaggaatgtgatcctgttctctgtgtttgatgagaacaggagctggtacctgactgagaacatccagaggttcctgcccaaccctgctggggtgcagctggaggaccctgagttccaggccagcaacatcatgcacagcatcaatggctatgtgtttgacagcctgcagctgtctgtgtgcctgcatgaggtggcctactggtacatcctgagcattggggcccagactgacttcctgtctgtgttcttctctggctacaccttcaagcacaagatggtgtatgaggacaccctgaccctgttccccttctctggggagactgtgttcatgagcatggagaaccctggcctgtggattctgggctgccacaactctgacttcaggaacaggggcatgactgccctgctgaaagtctccagctgtgacaagaacactggggactactatgaggacagctatgaggacatctctgcctacctgctgagcaagaacaatgccattgagcccaggagcttcagccagaatagcaggcaccccagcaccaggcagaagcagttcaatgccaccaccatcccagagaataccaccctgcagtctgaccaggaggagattgactatgatgacaccatctctgtggagatgaagaaggaggactttgacatctacgacgaggacgagaaccagagccccaggagcttccagaagaagaccaggcactacttcattgctgctgtggagaggctgtgggactatggcatgagcagcagcccccatgtgctgaggaacagggcccagtctggctctgtgccccagttcaagaaggtggtgttccaggagttcactgatggcagcttcacccagcccctgtacagaggggagctgaatgagcacctgggcctgctgggcccctacatcagggctgaggtggaggacaacatcatggtgaccttcaggaaccaggccagcaggccctacagcttctacagcagcctgatcagctatgaggaggaccagaggcagggggctgagcccaggaagaactttgtgaagcccaatgaaaccaagacctacttctggaaggtgcagcaccacatggcccccaccaaggatgagtttgactgcaaggcctgggcctacttctctgatgtggacctggagaaggatgtgcactctggcctgattggccccctgctggtgtgccacaccaacaccctgaaccctgcccatggcaggcaggtgactgtgcaggagtttgccctgttcttcaccatctttgatgaaaccaagagctggtacttcactgagaacatggagaggaactgcagggccccctgcaacatccagatggaggaccccaccttcaaggagaactacaggttccatgccatcaatggctacatcatggacaccctgcctggcctggtgatggcccaggaccagaggatcaggtggtacctgctgagcatgggcagcaatgagaacatccacagcatccacttctctggccatgtgttcactgtgaggaagaaggaggagtacaagatggccctgtacaacctgtaccctggggtgtttgagactgtggagatgctgcccagcaaggctggcatctggagggtggagtgcctgattggggagcacctgcatgctggcatgagcaccctgttcctggtgtacagcaacaagtgccagacccccctgggcatggcctctggccacatcagggacttccagatcactgcctctggccagtatggccagtgggcccccaagctggccaggctgcactactctggcagcatcaatgcctggagcaccaaggagcccttcagctggatcaaggtggacctgctggcccccatgatcatccatggcatcaagacccagggggccaggcagaagttcagcagcctgtacatcagccagttcatcatcatgtacagcctggatggcaagaagtggcagacctacaggggcaacagcactggcaccctgatggtgttctttggcaatgtggacagctctggcatcaagcacaacatcttcaacccccccatcattgccagatacatcaggctgcaccccacccactacagcatcaggagcaccctgaggatggagctgatgggctgtgacctgaacagctgcagcatgcccctgggcatggagagcaaggccatctctgatgcccagatcactgccagcagctacttcaccaacatgtttgccacctggagccccagcaaggccaggctgcacctgcagggcaggagcaatgcctggaggccccaggtcaacaaccccaaggagtggctgcaggtggacttccagaagaccatgaaggtgactggggtgaccacccagggggtgaagagcctgctgaccagcatgtatgtgaaggagttcctgatcagcagcagccaggatggccaccagtggaccctgttcttccagaatggcaaggtgaaggtgttccagggcaaccaggacagcttcacccctgtggtgaacagcctggacccccccctgctgaccagatacctgaggattcacccccagagctgggtgcaccagattgccctgaggatggaggtgctgggctgtgaggcccaggacctgtactga

SEQ ID NO: 144 - DNA, 11 bp, synthetic construct
  misc_feature 1..11: note = Synthetic: spacer
  source 1..11: mol_type = other DNA
tgcaaagtcct

SEQ ID NO: 145 - DNA, 11 bp, synthetic construct
  misc_feature 1..11: note = Synthetic: spacer
  source 1..11: mol_type = other DNA
agtgtttacaa

SEQ ID NO: 146 - DNA, 10828 bp, synthetic construct
  misc_feature 1..10828: note = Synthetic: ceDNA-plasmid sequence
  source 1..10828: mol_type = other DNA
aaagtagccgaagatgacggtttgtcacatggagttggcaggatgtttgattaaaaacataacaggaagaaaaatgccccgctgtgggcggacaaaatagttgggaactgggaggggtggaaatggagtttttaaggattatttagggaagagtgacaaaatagatgggaactgggtgtagcgtcgtaagctaatacgaaaattaaaaatgacaaaatagtttggaactagatttcacttatctggttcggatctcctaggcctgcaggcagctgcgcgctcgctcgctcactgaggccgcccgggcaaagcccgggcgtcgggcgacctttggtcgcccggcctcagtgagcgagcgagcgcgcagagagggagtggccaactccatcactaggggttccttgtagttaatgattaacccgccatgctacttatcgcggccgcaggggaagctactggtgaatattaaccaaggtcacccagttatcagggagcaaacaggagctaagtccatagggggaagctactggtgaatattaaccaaggtcacccagttatcagggagcaaacaggagctaagtccatagggggaagctactggtgaatattaaccaaggtcacccagttatcagggagcaaacaggagctaagtccatggtacccactgggaggatgttgagtaagatggaaaactactgatgacccttgcagagacagagtattaggacatgtttgaacaggggccgggcgatcagcaggtagctctagaggatccccgtctgtctgcacatttcgtagagcgagtgttccgatactctaatctccctaggcaaggttcatatttgtgtaggttacttattctccttttgttgactaagtcaataatcagaatcagcaggtttggagtcagcttggcagggatcagcagcctgggttggaaggagggggtataaaagccccttcaccaggagaagccgtcacacagatccacaagctcctgaagaggtaagggtttaagggatggttggttggtggggtattaatgtttaattacctggagcacctgcctgaaatcactttttttcaggttggtttaaacgccgccaccatgcagattgagctgagcacctgcttcttcctgtgcctgctgaggttctgcttctctgccaccaggagatactacctgggggctgtggagctgagctgggactacatgcagtctgacctgggggagctgcctgtggatgccaggttcccccccagagtgcccaagagcttccccttcaacacctctgtggtgtacaagaagaccctgtttgtggagttcactgaccacctgttcaacattgccaagcccaggcccccctggatgggcctgctgggccccaccatccaggctgaggtgtatgacactgtggtgatcaccctgaagaacatggccagccaccctgtgagcctgcatgctgtgggggtgagctactggaaggcctctgagggggctgagtatgatgaccagaccagccagagggagaaggaggatgacaaggtgttccctgggggcagccacacctatgtgtggcaggtgctgaaggagaatggccccatggcctctgaccccctgtgcctgacctacagctacctgagccatgtggacctggtgaaggacctgaactctggcctgattggggccctgctggtgtgcagggagggcagcctggccaaggagaagacccagaccctgcacaagttcatcctgctgtttgctgtgtttgatgagggcaagagctggcactctgaaaccaagaacagcctgatgcaggacagggatgctgcctctgccagggcctggcccaagatgcacactgtgaatggctatgtgaacaggagcctgcctggcctgattggctgccacaggaagtctgtgtactggcatgtgattggcatgggcaccacccctgaggtgcacagcatcttcctggagggccacaccttcctggtcaggaaccacaggcaggccagcctggagatcagccccatcaccttcctgactgcccagaccctgctgatggacctgggccagttcctgctgttctgccacatcagcagccaccagcatgatggcatggaggcctatgtgaaggtggacagctgccctgaggagccccagctgaggatgaagaacaatgaggaggctgaggactatgatgatgacctgactgactctgagatggatgtggtgaggtttgatgatgacaacagccccagcttcatccagatcaggtctgtggccaagaagcaccccaagacctgggtgcactacattgctgctgaggaggaggactgggactatgcccccctggtgctggcccctgatgacaggagctacaagagccagtacctgaacaatggcccccagaggattggcaggaagtacaagaaggtcaggttcatggcctacactgatgaaaccttcaagaccagggaggccatccagcatgagtctggcatcctgggccccctgctgtatggggaggtgggggacaccctgctgatcatcttcaagaaccaggccagcaggccctacaacatctacccccatggcatcactgatgtgaggcccctgtacagcaggaggctgcccaagggggtgaagcacctgaaggacttccccatcctgcctggggagatcttcaagtacaagtggactgtgactgtggaggatggccccaccaagtctgaccccaggtgcctgaccagatactacagcagctttgtgaacatggagagggacctggcctctggcctgattggccccctgctgatctgctacaaggagtctgtggaccagaggggcaaccagatcatgtctgacaagaggaatgtgatcctgttctctgtgtttgatgagaacaggagctggtacctgactgagaacatccagaggttcctgcccaaccctgctggggtgcagctggaggaccctgagttccaggccagcaacatcatgcacagcatcaatggctatgtgtttgacagcctgcagctgtctgtgtgcctgcatgaggtggcctactggtacatcctgagcattggggcccagactgacttcctgtctgtgttcttctctggctacaccttcaagcacaagatggtgtatgaggacaccctgaccctgttccccttctctggggagactgtgttcatgagcatggagaaccctggcctgtggattctgggctgccacaactctgacttcaggaacaggggcatgactgccctgctgaaagtctccagctgtgacaagaacactggggactactatgaggacagctatgaggacatctctgcctacctgctgagcaagaacaatgccattgagcccaggagcttcagccagaatagcaggcaccccagcaccaggcagaagcagttcaatgccaccaccatcccagagaataccaccctgcagtctgaccaggaggagattgactatgatgacaccatctctgtggagatgaagaaggaggactttgacatctacgacgaggacgagaaccagagccccaggagcttccagaagaagaccaggcactacttcattgctgctgtggagaggctgtgggactatggcatgagcagcagcccccatgtgctgaggaacagggcccagtctggctctgtgccccagttcaagaaggtggtgttccaggagttcactgatggcagcttcacccagcccctgtacagaggggagctgaatgagcacctgggcctgctgggcccctacatcagggctgaggtggaggacaacatcatggtgaccttcaggaaccaggccagcaggccctacagcttctacagcagcctgatcagctatgaggaggaccagaggcagggggctgagcccaggaagaactttgtgaagcccaatgaaaccaagacctacttctggaaggtgcagcaccacatggcccccaccaaggatgagtttgactgcaaggcctgggcctacttctctgatgtggacctggagaaggatgtgcactctggcctgattggccccctgctggtgtgccacaccaacaccctgaaccctgcccatggcaggcaggtgactgtgcaggagtttgccctgttcttcaccatctttgatgaaaccaagagctggtacttcactgagaacatggagaggaactgcagggccccctgcaacatccagatggaggaccccaccttcaaggagaactacaggttccatgccatcaatggctacatcatggacaccctgcctggcctggtgatggcccaggaccagaggatcaggtggtacctgctgagcatgggcagcaatgagaacatccacagcatccacttctctggccatgtgttcactgtgaggaagaaggaggagtacaagatggccctgtacaacctgtaccctggggtgtttgagactgtggagatgctgcccagcaaggctggcatctggagggtggagtgcctgattggggagcacctgcatgctggcatgagcaccctgttcctggtgtacagcaacaagtgccagacccccctgggcatggcctctggccacatcagggacttccagatcactgcctctggccagtatggccagtgggcccccaagctggccaggctgcactactctggcagcatcaatgcctggagcaccaaggagcccttcagctggatcaaggtggacctgctggcccccatgatcatccatggcatcaagacccagggggccaggcagaagttcagcagcctgtacatcagccagttcatcatcatgtacagcctggatggcaagaagtggcagacctacaggggcaacagcactggcaccctgatggtgttctttggcaatgtggacagctctggcatcaagcacaacatcttcaacccccccatcattgccagatacatcaggctgcaccccacccactacagcatcaggagcaccctgaggatggagctgatgggctgtgacctgaacagctgcagcatgcccctgggcatggagagcaaggccatctctgatgcccagatcactgccagcagctacttcaccaacatgtttgccacctggagccccagcaaggccaggctgcacctgcagggcaggagcaatgcctggaggccccaggtcaacaaccccaaggagtggctgcaggtggacttccagaagaccatgaaggtgactggggtgaccacccagggggtgaagagcctgctgaccagcatgtatgtgaaggagttcctgatcagcagcagccaggatggccaccagtggaccctgttcttccagaatggcaaggtgaaggtgttccagggcaaccaggacagcttcacccctgtggtgaacagcctggacccccccctgctgaccagatacctgaggattcacccccagagctgggtgcaccagattgccctgaggatggaggtgctgggctgtgaggcccaggacctgtactgattaattaagagcatcttaccgccatttattcccatatttgttctgtttttcttgatttgggtatacatttaaatgttaataaaacaaaatggtggggcaatcatttacatttttagggatatgtaattactagttcaggtgtattgccacaagacaaacatgttaagaaactttcccgttatttacgctctgttcctgttaatcaacctctggattacaaaatttgtgaaagattgactgatattcttaactatgttgctccttttacgctgtgtggatatgctgctttatagcctctgtatctagctattgcttcccgtacggctttcgttttctcctccttgtataaatcctggttgctgtctcttttagaggagttgtggcccgttgtccgtcaacgtggcgtggtgtgctctgtgtttgctgacgcaacccccactggctggggcattgccaccacctgtcaactcctttctgggactttcgctttccccctcccgatcgccacggcagaactcatcgccgcctgccttgcccgctgctggacaggggctaggttgctgggcactgataattccgtggtgttgtctgtgccttctagttgccagccatctgttgtttgcccctcccccgtgccttccttgaccctggaaggtgccactcccactgtcctttcctaataaaatgaggaaattgcatcgcattgtctgagtaggtgtcattctattctggggggtggggtggggcaggacagcaagggggaggattgggaagacaatagcaggcatgctggggatgcggtgggctctatggctctagagcatggctacgtagataagtagcatggcgggttaatcattaactacacctgcaggaggaacccctagtgatggagttggccactccctctctgcgcgctcgctcgctcactgaggccgggcgaccaaaggtcgcccgacgcccgggcggcctcagtgagcgagcgagcgcgcagctgcctgcaggggcgcgcctcgagccatggtgctagcagctgatgcatagcatgcggtaccgggagatgggggaggctaactgaaacacggaaggagacaataccggaaggaacccgcgctatgacggcaataaaaagacagaataaaacgcacgggtgttgggtcgtttgttcataaacgcggggttcggtcccagggctggcactctgtcgataccccaccgagaccccattgggaccaatacgcccgcgtttcttccttttccccaccccaacccccaagttcgggtgaaggcccagggctcgcagccaacgtcggggcggcaagccctgccatagccactacgggtacgtaggccaaccactagaactatagctagagtcctgggcgaacaaacgatgctcgccttccagaaaaccgaggatgcgaaccacttcatccggggtcagcaccaccggcaagcgccgcgacggccgaggtctaccgatctcctgaagccagggcagatccgtgcacagcaccttgccgtagaagaacagcaaggccgccaatgcctgacgatgcgtggagaccgaaaccttgcgctcgttcgccagccaggacagaaatgcctcgacttcgctgctgcccaaggttgccgggtgacgcacaccgtggaaacggatgaaggcacgaacccagttgacataagcctgttcggttcgtaaactgtaatgcaagtagcgtatgcgctcacgcaactggtccagaaccttgaccgaacgcagcggtggtaacggcgcagtggcggttttcatggcttgttatgactgtttttttgtacagtctatgcctcgggcatccaagcagcaagcgcgttacgccgtgggtcgatgtttgatgttatggagcagcaacgatgttacgcagcagcaacgatgttacgcagcagggcagtcgccctaaaacaaagttaggtggctcaagtatgggcatcattcgcacatgtaggctcggccctgaccaagtcaaatccatgcgggctgctcttgatcttttcggtcgtgagttcggagacgtagccacctactcccaacatcagccggactccgattacctcgggaacttgctccgtagtaagacattcatcgcgcttgctgccttcgaccaagaagcggttgttggcgctctcgcggcttacgttctgcccaggtttgagcagccgcgtagtgagatctatatctatgatctcgcagtctccggcgagcaccggaggcagggcattgccaccgcgctcatcaatctcctcaagcatgaggccaacgcgcttggtgcttatgtgatctacgtgcaagcagattacggtgacgatcccgcagtggctctctatacaaagttgggcatacgggaagaagtgatgcactttgatatcgacccaagtaccgccacctaacaattcgttcaagccgagatcggcttcccggccgcggagttgttcggtaaattgtcacaacgccgcgaatatagtctttaccatgcccttggccacgcccctctttaatacgacgggcaatttgcacttcagaaaatgaagagtttgctttagccataacaaaagtccagtatgctttttcacagcataactggactgatttcagtttacaactattctgtctagtttaagactttattgtcatagtttagatctattttgttcagtttaagactttattgtccgcccacacccgcttacgcagggcatccatttattactcaaccgtaaccgattttgccaggttacgcggctggtctgcggtgtgaaataccgcacagatgcgtaaggagaaaataccgcatcaggcgctcttccgcttcctcgctcactgactcgctgcgctcggtcgttcggctgcggcgagcggtatcagctcactcaaaggcggtaatacggttatccacagaatcaggggataacgcaggaaagaacatgtgagcaaaaggccagcaaaaggccaggaaccgtaaaaaggccgcgttgctggcgtttttccataggctccgcccccctgacgagcatcacaaaaatcgacgctcaagtcagaggtggcgaaacccgacaggactataaagataccaggcgtttccccctggaagctccctcgtgcgctctcctgttccgaccctgccgcttaccggatacctgtccgcctttctcccttcgggaagcgtggcgctttctcaatgctcacgctgtaggtatctcagttcggtgtaggtcgttcgctccaagctgggctgtgtgcacgaaccccccgttcagcccgaccgctgcgccttatccggtaactatcgtcttgagtccaacccggtaagacacgacttatcgccactggcagcagccactggtaacaggattagcagagcgaggtatgtaggcggtgctacagagttcttgaagtggtggcctaactacggctacactagaaggacagtatttggtatctgcgctctgctgaagccagttaccttcggaaaaagagttggtagctcttgatccggcaaacaaaccaccgctggtagcggtggtttttttgtttgcaagcagcagattacgcgcagaaaaaaaggatctcaagaagatcctttgatcttttctacggggtctgacgctcagtggaacgaaaactcacgttaagggattttggtcatgagattatcaaaaaggatcttcacctagatccttttaaattaaaaatgaagttttaaatcaatctaaagtatatatgagtaaacttggtctgacagttaccaatgcttaatcagtgaggcacctatctcagcgatctgtctatttcgttcatccatagttgcctgactccccgtcgtgtagataactacgatacgggagggcttaccatctggccccagtgctgcaatgataccgcgagacccacgctcaccggctccagatttatcagcaataaaccagccagccggaagggccgagcgcagaagtggtcctgcaactttatccgcctccatccagtctattaattgttgccgggaagctagagtaagtagttcgccagttaatagtttgcgcaacgttgttgccattgctacaggcatcgtggtgtcacgctcgtcgtttggtatggcttcattcagctccggttcccaacgatcaaggcgagttacatgatcccccatgttgtgcaaaaaagcggttagctccttcggtcctccgatcgttgtcagaagtaagttggccgcagtgttatcactcatggttatggcagcactgcataattctcttactgtcatgccatccgtaagatgcttttctgtgactggtgagtactcaaccaagtcattctgagaatagtgtatgcggcgaccgagttgctcttgcccggcgtcaatacgggataataccgcgccacatagcagaactttaaaagtgctcatcattggaaaacgttcttcggggcgaaaactctcaaggatcttaccgctgttgagatccagttcgatgtaacccactcgtgcacccaactgatcttcagcatcttttactttcaccagcgtttctgggtgagcaaaaacaggaaggcaaaatgccgcaaaaaagggaataagggcgacacggaaatgttgaatactcatactcttcctttttcaatattattgaagcatttatcagggttattgtctcatgagcggatacatatttgaatgtatttagaaaaataaacaaataggggttccgcgcacatttccccgaaaagtgccacctgaaattgtaaacgttaatattttgttaaaattcgcgttaaatttttgttaaatcagctcattttttaaccaataggccgaaatcggcaaaatcccttataaatcaaaagaatagaccgagatagggttgagtgttgttccagtttggaacaagagtccactattaaagaacgtggactccaacgtcaaagggcgaaaaaccgtctatcagggcgatggcccactacgtgaaccatcaccctaatcaagttttttggggtcgaggtgccgtaaagcactaaatcggaaccctaaagggagcccccgatttagagcttgacggggaaagccggcgaacgtggcgagaaaggaagggaagaaagcgaaaggagcgggcgctagggcgctggcaagtgtagcggtcacgctgcgcgtaaccaccacacccgccgcgcttaatgcgccgctacagggcgcgtcccattcgccattcaggctgcaaataagcgttgatattcagtcaattacaaacattaataacgaagagatgacagaaaaattttcattctgtgacagagaa

SEQ ID NO: 147 - DNA, 6250 bp, synthetic construct
  misc_feature 1..6250: note = Synthetic: ceDNA-plasmid
  source 1..6250: mol_type = other DNA
cctgcaggcagctgcgcgctcgctcgctcactgaggccgcccgggcaaagcccgggcgtcgggcgacctttggtcgcccggcctcagtgagcgagcgagcgcgcagagagggagtggccaactccatcactaggggttccttgtagttaatgattaacccgccatgctacttatcgcggccgcgggggaggctgctggtgaatattaaccaaggtcaccccagttatcggaggagcaaacaggggctaagtccaccgggggaggctgctggtgaatattaaccaaggtcaccccagttatcggaggagcaaacaggggctaagtccaccgggggaggctgctggtgaatattaaccaaggtcaccccagttatcggaggagcaaacaggggctaagtccacggtacccactgggaggatgttgagtaagatggaaaactactgatgacccttgcagagacagagtattaggacatgtttgaacaggggccgggcgatcagcaggtagctctagaggatccccgtctgtctgcacatttcgtagagcgagtgttccgatactctaatctccctaggcaaggttcatatttgtgtaggttacttattctccttttgttgactaagtcaataatcagaatcagcaggtttggagtcagcttggcagggatcagcagcctgggttggaaggagggggtataaaagccccttcaccaggagaagccgtcacacagatccacaagctcctgaagaggtaagggtttaagggatggttggttggtggggtattaatgtttaattacctggagcacctgcctgaaatcactttttttcaggttggtttaaacgccgccaccatgcagattgagctgagcacctgcttcttcctgtgcctgctgaggttctgcttctctgccaccaggagatactacctgggggctgtggagctgagctgggactacatgcagtctgacctgggggagctgcctgtggatgccaggttcccccccagagtgcccaagagcttccccttcaacacctctgtggtgtacaagaagaccctgtttgtggagttcactgaccacctgttcaacattgccaagcccaggcccccctggatgggcctgctgggccccaccatccaggctgaggtgtatgacactgtggtgatcaccctgaagaacatggccagccaccctgtgagcctgcatgctgtgggggtgagctactggaaggcctctgagggggctgagtatgatgaccagaccagccagagggagaaggaggatgacaaggtgttccctgggggcagccacacctatgtgtggcaggtgctgaaggagaatggccccatggcctctgaccccctgtgcctgacctacagctacctgagccatgtggacctggtgaaggacctgaactctggcctgattggggccctgctggtgtgcagggagggcagcctggccaaggagaagacccagaccctgcacaagttcatcctgctgtttgctgtgtttgatgagggcaagagctggcactctgaaaccaagaacagcctgatgcaggacagggatgctgcctctgccagggcctggcccaagatgcacactgtgaatggctatgtgaacaggagcctgcctggcctgattggctgccacaggaagtctgtgtactggcatgtgattggcatgggcaccacccctgaggtgcacagcatcttcctggagggccacaccttcctggtcaggaaccacaggcaggccagcctggagatcagccccatcaccttcctgactgcccagaccctgctgatggacctgggccagttcctgctgttctgccacatcagcagccaccagcatgatggcatggaggcctatgtgaaggtggacagctgccctgaggagccccagctgaggatgaagaacaatgaggaggctgaggactatgatgatgacctgactgactctgagatggatgtggtgaggtttgatgatgacaacagccccagcttcatccagatcaggtctgtggccaagaagcaccccaagacctgggtgcactacattgctgctgaggaggaggactgggactatgcccccctggtgctggcccctgatgacaggagctacaagagccagtacctgaacaatggcccccagaggattggcaggaagtacaagaaggtcaggttcatggcctacactgatgaaaccttcaagaccagggaggccatccagcatgagtctggcatcctgggccccctgctgtatggggaggtgggggacaccctgctgatcatcttcaagaaccaggccagcaggccctacaacatctacccccatggcatcactgatgtgaggcccctgtacagcaggaggctgcccaagggggtgaagcacctgaaggacttccccatcctgcctggggagatcttcaagtacaagtggactgtgactgtggaggatggccccaccaagtctgaccccaggtgcctgaccagatactacagcagctttgtgaacatggagagggacctggcctctggcctgattggccccctgctgatctgctacaaggagtctgtggaccagaggggcaaccagatcatgtctgacaagaggaatgtgatcctgttctctgtgtttgatgagaacaggagctggtacctgactgagaacatccagaggttcctgcccaaccctgctggggtgcagctggaggaccctgagttccaggccagcaacatcatgcacagcatcaatggctatgtgtttgacagcctgcagctgtctgtgtgcctgcatgaggtggcctactggtacatcctgagcattggggcccagactgacttcctgtctgtgttcttctctggctacaccttcaagcacaagatggtgtatgaggacaccctgaccctgttccccttctctggggagactgtgttcatgagcatggagaaccctggcctgtggattctgggctgccacaactctgacttcaggaacaggggcatgactgccctgctgaaagtctccagctgtgacaagaacactggggactactatgaggacagctatgaggacatctctgcctacctgctgagcaagaacaatgccattgagcccaggagcttcagccagaatagcaggcaccccagcaccaggcagaagcagttcaatgccaccaccatcccagagaataccaccctgcagtctgaccaggaggagattgactatgatgacaccatctctgtggagatgaagaaggaggactttgacatctacgacgaggacgagaaccagagccccaggagcttccagaagaagaccaggcactacttcattgctgctgtggagaggctgtgggactatggcatgagcagcagcccccatgtgctgaggaacagggcccagtctggctctgtgccccagttcaagaaggtggtgttccaggagttcactgatggcagcttcacccagcccctgtacagaggggagctgaatgagcacctgggcctgctgggcccctacatcagggctgaggtggaggacaacatcatggtgaccttcaggaaccaggccagcaggccctacagcttctacagcagcctgatcagctatgaggaggaccagaggcagggggctgagcccaggaagaactttgtgaagcccaatgaaaccaagacctacttctggaaggtgcagcaccacatggcccccaccaaggatgagtttgactgcaaggcctgggcctacttctctgatgtggacctggagaaggatgtgcactctggcctgattggccccctgctggtgtgccacaccaacaccctgaaccctgcccatggcaggcaggtgactgtgcaggagtttgccctgttcttcaccatctttgatgaaaccaagagctggtacttcactgagaacatggagaggaactgcagggccccctgcaacatccagatggaggaccccaccttcaaggagaactacaggttccatgccatcaatggctacatcatggacaccctgcctggcctggtgatggcccaggaccagaggatcaggtggtacctgctgagcatgggcagcaatgagaacatccacagcatccacttctctggccatgtgttcactgtgaggaagaaggaggagtacaagatggccctgtacaacctgtaccctggggtgtttgagactgtggagatgctgcccagcaaggctggcatctggagggtggagtgcctgattggggagcacctgcatgctggcatgagcaccctgttcctggtgtacagcaacaagtgccagacccccctgggcatggcctctggccacatcagggacttccagatcactgcctctggccagtatggccagtgggcccccaagctggccaggctgcactactctggcagcatcaatgcctggagcaccaaggagcccttcagctggatcaaggtggacctgctggcccccatgatcatccatggcatcaagacccagggggccaggcagaagttcagcagcctgtacatcagccagttcatcatcatgtacagcctggatggcaagaagtggcagacctacaggggcaacagcactggcaccctgatggtgttctttggcaatgtggacagctctggcatcaagcacaacatcttcaacccccccatcattgccagatacatcaggctgcaccccacccactacagcatcaggagcaccctgaggatggagctgatgggctgtgacctgaacagctgcagcatgcccctgggcatggagagcaaggccatctctgatgcccagatcactgccagcagctacttcaccaacatgtttgccacctggagccccagcaaggccaggctgcacctgcagggcaggagcaatgcctggaggccccaggtcaacaaccccaaggagtggctgcaggtggacttccagaagaccatgaaggtgactggggtgaccacccagggggtgaagagcctgctgaccagcatgtatgtgaaggagttcctgatcagcagcagccaggatggccaccagtggaccctgttcttccagaatggcaaggtgaaggtgttccagggcaaccaggacagcttcacccctgtggtgaacagcctggacccccccctgctgaccagatacctgaggattcacccccagagctgggtgcaccagattgccctgaggatggaggtgctgggctgtgaggcccaggacctgtactgattaattaagagcatcttaccgccatttattcccatatttgttctgtttttcttgatttgggtatacatttaaatgttaataaaacaaaatggtggggcaatcatttacatttttagggatatgtaattactagttcaggtgtattgccacaagacaaacatgttaagaaactttcccgttatttacgctctgttcctgttaatcaacctctggattacaaaatttgtgaaagattgactgatattcttaactatgttgctccttttacgctgtgtggatatgctgctttatagcctctgtatctagctattgcttcccgtacggctttcgttttctcctccttgtataaatcctggttgctgtctcttttagaggagttgtggcccgttgtccgtcaacgtggcgtggtgtgctctgtgtttgctgacgcaacccccactggctggggcattgccaccacctgtcaactcctttctgggactttcgctttccccctcccgatcgccacggcagaactcatcgccgcctgccttgcccgctgctggacaggggctaggttgctgggcactgataattccgtggtgttgtctgtgccttctagttgccagccatctgttgtttgcccctcccccgtgccttccttgaccctggaaggtgccactcccactgtcctttcctaataaaatgaggaaattgcatcgcattgtctgagtaggtgtcattctattctggggggtggggtggggcaggacagcaagggggaggattgggaagacaatagcaggcatgctggggatgcggtgggctctatggctctagagcatggctacgtagataagtagcatggcgggttaatcattaactacacctgcaggaggaacccctagtgatggagttggccactccctctctgcgcgctcgctcgctcactgaggccgggcgaccaaaggtcgcccgacgcccgggcggcctcagtgagcgagcgagcgcgcagctgcctgcagg

SEQ ID NO: 148 - DNA, 82 bp, synthetic construct
  misc_feature 1..82: note = Synthetic: Forward
  source 1..82: mol_type = other DNA
aatgatacggcgaccaccgagatctacactctttccctacacgacgctcttccgatctggagggaagattgctgtgtgatag

SEQ ID NO: 149 - DNA, 88 bp, synthetic construct
  misc_feature 1..88: note = Synthetic: Reverse 1
  source 1..88: mol_type = other DNA
caagcagaagacggcatacgagatgtgactgtgactggagttcagacgtgtgctcttccgatctcaggaacagagcgtaaataacggg

SEQ ID NO: 150 - DNA, 88 bp, synthetic construct
  misc_feature 1..88: note = Synthetic: Reverse 2
  source 1..88: mol_type = other DNA
caagcagaagacggcatacgagatctgcaagtgactggagttcagacgtgtgctcttccgatctcaggaacagagcgtaaataacggg

SEQ ID NO: 151 - DNA, 88 bp, synthetic construct
  misc_feature 1..88: note = Synthetic: Reverse 3
  source 1..88: mol_type = other DNA
caagcagaagacggcatacgagataccatggtgactggagttcagacgtgtgctcttccgatctcaggaacagagcgtaaataacggg

SEQ ID NO: 152 - DNA, 88 bp, synthetic construct
  misc_feature 1..88: note = Synthetic: Reverse 4
  source 1..88: mol_type = other DNA
caagcagaagacggcatacgagatgaacgtgtgactggagttcagacgtgtgctcttccgatctcaggaacagagcgtaaataacggg

SEQ ID NO: 153 - DNA, 88 bp, synthetic construct
  misc_feature 1..88: note = Synthetic: Reverse 5
  source 1..88: mol_type = other DNA
caagcagaagacggcatacgagatactagtgtgactggagttcagacgtgtgctcttccgatctcaggaacagagcgtaaataacggg

SEQ ID NO: 154 - DNA, 88 bp, synthetic construct
  misc_feature 1..88: note = Synthetic: Reverse 6
  source 1..88: mol_type = other DNA
caagcagaagacggcatacgagatcgttacgtgactggagttcagacgtgtgctcttccgatctcaggaacagagcgtaaataacggg

SEQ ID NO: 155 - DNA, 72 bp, synthetic construct
  misc_feature 1..72: note = Synthetic: 202_Human_monoMut_G1C_n1
  source 1..72: mol_type = other DNA
cggggaggctgctggtgaatattaaccaaggtcaccccagttatcggaggagcaaacaggggctaagtccac

SEQ ID NO: 156 - DNA, 72 bp, synthetic construct
  misc_feature 1..72: note = Synthetic: 204_Human_monoMut_G2A_n1
  source 1..72: mol_type = other DNA
gagggaggctgctggtgaatattaaccaaggtcaccccagttatcggaggagcaaacaggggctaagtccac

SEQ ID NO: 157 - DNA, 72 bp, synthetic construct
  misc_feature 1..72: note = Synthetic: 206_Human_monoMut_G2T_n1
  source 1..72: mol_type = other DNA
gtgggaggctgctggtgaatattaaccaaggtcaccccagttatcggaggagcaaacaggggctaagtccac

SEQ ID NO: 158 - DNA, 72 bp, synthetic construct
  misc_feature 1..72: note = Synthetic: 210_Human_monoMut_G4A_n1
  source 1..72: mol_type = other DNA
gggagaggctgctggtgaatattaaccaaggtcaccccagttatcggaggagcaaacaggggctaagtccac

SEQ ID NO: 159 - DNA, 72 bp, synthetic construct
  misc_feature 1..72: note = Synthetic: 214_Human_monoMut_G5C_n1
  source 1..72: mol_type = other DNA
ggggcaggctgctggtgaatattaaccaaggtcaccccagttatcggaggagcaaacaggggctaagtccac

SEQ ID NO: 160 - DNA, 72 bp, synthetic construct
  misc_feature 1..72: note = Synthetic: 216_Human_monoMut_A6C_n1
  source 1..72: mol_type = other DNA
gggggcggctgctggtgaatattaaccaaggtcaccccagttatcggaggagcaaacaggggctaagtccac

SEQ ID NO: 161 - DNA, 72 bp, synthetic construct
  misc_feature 1..72: note = Synthetic: 220_Human_monoMut_G7C_n1
  source 1..72: mol_type = other DNA
gggggacgctgctggtgaatattaaccaaggtcaccccagttatcggaggagcaaacaggggctaagtccac

SEQ ID NO: 162 - DNA, 72 bp, synthetic construct
  misc_feature 1..72: note = Synthetic: 225_Human_monoMut_C9A_n1
  source 1..72: mol_type = other DNA
gggggaggatgctggtgaatattaaccaaggtcaccccagttatcggaggagcaaacaggggctaagtccac

SEQ ID NO: 163 - DNA, 72 bp, synthetic construct
  misc_feature 1..72: note = Synthetic: 226_Human_monoMut_C9G_n1
  source 1..72: mol_type = other DNA
gggggagggtgctggtgaatattaaccaaggtcaccccagttatcggaggagcaaacaggggctaagtccac

SEQ ID NO: 164 - DNA, 72 bp, synthetic construct
  misc_feature 1..72: note = Synthetic: 229_Human_monoMut_T10C_n1
  source 1..72: mol_type = other DNA
gggggaggccgctggtgaatattaaccaaggtcaccccagttatcggaggagcaaacaggggctaagtccac

SEQ ID NO: 165 - DNA, 72 bp, synthetic construct
  misc_feature 1..72: note = Synthetic: 230_Human_monoMut_T10G_n1
  source 1..72: mol_type = other DNA
gggggaggcggctggtgaatattaaccaaggtcaccccagttatcggaggagcaaacaggggctaagtccac

SEQ ID NO: 166 - DNA, 72 bp, synthetic construct
  misc_feature 1..72: note = Synthetic: 235_Human_monoMut_C12G_n1
  source 1..72: mol_type = other DNA
gggggaggctggtggtgaatattaaccaaggtcaccccagttatcggaggagcaaacaggggctaagtccac

SEQ ID NO: 167 - DNA, 72 bp, synthetic construct
  misc_feature 1..72: note = Synthetic: 236_Human_monoMut_C12T_n1
  source 1..72: mol_type = other DNA
gggggaggctgttggtgaatattaaccaaggtcaccccagttatcggaggagcaaacaggggctaagtccac

SEQ ID NO: 168 - DNA, 72 bp, synthetic construct
  misc_feature 1..72: note = Synthetic: 245_Human_monoMut_G15T_n1
  source 1..72: mol_type = other DNA
gggggaggctgctgttgaatattaaccaaggtcaccccagttatcggaggagcaaacaggggctaagtccac

SEQ ID NO: 169 - DNA, 72 bp, synthetic construct
  misc_feature 1..72: note = Synthetic: 247_Human_monoMut_T16C_n1
  source 1..72: mol_type = other DNA
gggggaggctgctggcgaatattaaccaaggtcaccccagttatcggaggagcaaacaggggctaagtccac

SEQ ID NO: 170 - DNA, 72 bp, synthetic construct
  misc_feature 1..72: note = Synthetic: 250_Human_monoMut_G17C_n1
  source 1..72: mol_type = other DNA
gggggaggctgctggtcaatattaaccaaggtcaccccagttatcggaggagcaaacaggggctaagtccac

SEQ ID NO: 171 - DNA, 72 bp, synthetic construct
  misc_feature 1..72: note = Synthetic: 251_Human_monoMut_G17T_n1
  source 1..72: mol_type = other DNA
gggggaggctgctggttaatattaaccaaggtcaccccagttatcggaggagcaaacaggggctaagtccac

SEQ ID NO: 172 - DNA, 72 bp, synthetic construct
  misc_feature 1..72: note = Synthetic: 260_Human_monoMut_T20G_n1
  source 1..72: mol_type = other DNA
gggggaggctgctggtgaagattaaccaaggtcaccccagttatcggaggagcaaacaggggctaagtccac

SEQ ID NO: 173 - DNA, 72 bp, synthetic construct
  misc_feature 1..72: note = Synthetic: 261_Human_monoMut_A21C_n1
  source 1..72: mol_type = other DNA
gggggaggctgctggtgaatcttaaccaaggtcaccccagttatcggaggagcaaacaggggctaagtccac

SEQ ID NO: 174 - DNA, 72 bp, synthetic construct
  misc_feature 1..72: note = Synthetic: 263_Human_monoMut_A21T_n1
  source 1..72: mol_type = other DNA
gggggaggctgctggtgaattttaaccaaggtcaccccagttatcggaggagcaaacaggggctaagtccac

SEQ ID NO: 175 - DNA, 72 bp, synthetic construct
  misc_feature 1..72: note = Synthetic: 264_Human_monoMut_T22A_n1
  source 1..72: mol_type = other DNA
gggggaggctgctggtgaataataaccaaggtcaccccagttatcggaggagcaaacaggggctaagtccac

SEQ ID NO: 176 - DNA, 72 bp, synthetic construct
  misc_feature 1..72: note = Synthetic: 269_Human_monoMut_T23G_n1
  source 1..72: mol_type = other DNA
gggggaggctgctggtgaatatgaaccaaggtcaccccagttatcggaggagcaaacaggggctaagtccac

SEQ ID NO: 177 - DNA, 72 bp, synthetic construct
  misc_feature 1..72: note = Synthetic: 270_Human_monoMut_A24C_n1
  source 1..72: mol_type = other DNA
gggggaggctgctggtgaatattcaccaaggtcaccccagttatcggaggagcaaacaggggctaagtccac

SEQ ID NO: 178 - DNA, 72 bp, synthetic construct
  misc_feature 1..72: note = Synthetic: 274_Human_monoMut_A25G_n1
  source 1..72: mol_type = other DNA
gggggaggctgctggtgaatattagccaaggtcaccccagttatcggaggagcaaacaggggctaagtccac

SEQ ID NO: 179 - DNA, 72 bp, synthetic construct
  misc_feature 1..72: note = Synthetic: 275_Human_monoMut_A25T_n1
  source 1..72: mol_type = other DNA
gggggaggctgctggtgaatattatccaaggtcaccccagttatcggaggagcaaacaggggctaagtccac

SEQ ID NO: 180 - DNA, 72 bp, synthetic construct
  misc_feature 1..72: note = Synthetic: 278_Human_monoMut_C26T_n1
  source 1..72: mol_type = other DNA
gggggaggctgctggtgaatattaatcaaggtcaccccagttatcggaggagcaaacaggggctaagtccac

SEQ ID NO: 181 - DNA, 72 bp, synthetic construct
  misc_feature 1..72: note = Synthetic: 282_Human_monoMut_A28C_n1
  source 1..72: mol_type = other DNA
gggggaggctgctggtgaatattaacccaggtcaccccagttatcggaggagcaaacaggggctaagtccac

SEQ ID NO: 182 - DNA, 72 bp, synthetic construct
  misc_feature 1..72: note = Synthetic: 283_Human_monoMut_A28G_n1
  source 1..72: mol_type = other DNA
gggggaggctgctggtgaatattaaccgaggtcaccccagttatcggaggagcaaacaggggctaagtccac

SEQ ID NO: 183 - DNA, 72 bp, synthetic construct
  misc_feature 1..72: note = Synthetic: 284_Human_monoMut_A28T_n1
  source 1..72: mol_type = other DNA
gggggaggctgctggtgaatattaacctaggtcaccccagttatcggaggagcaaacaggggctaagtccac

SEQ ID NO: 184 - DNA, 72 bp, synthetic construct
  misc_feature 1..72: note = Synthetic: 295_Human_monoMut_T32C_n1
  source 1..72: mol_type = other DNA
gggggaggctgctggtgaatattaaccaaggccaccccagttatcggaggagcaaacaggggctaagtccac

SEQ ID NO: 185 - DNA, 72 bp, synthetic construct
  misc_feature 1..72: note = Synthetic: 301_Human_monoMut_A34G_n1
  source 1..72: mol_type = other DNA
gggggaggctgctggtgaatattaaccaaggtcgccccagttatcggaggagcaaacaggggctaagtccac

SEQ ID NO: 186 - DNA, 72 bp, synthetic construct
  misc_feature 1..72: note = Synthetic: 303_Human_monoMut_C35A_n1
  source 1..72: mol_type = other DNA
gggggaggctgctggtgaatattaaccaaggtcaacccagttatcggaggagcaaacaggggctaagtccac

SEQ ID NO: 187 - DNA, 72 bp, synthetic construct
  misc_feature 1..72: note = Synthetic: 304_Human_monoMut_C35G_n1
  source 1..72: mol_type = other DNA
gggggaggctgctggtgaatattaaccaaggtcagcccagttatcggaggagcaaacaggggctaagtccac

SEQ ID NO: 188 - DNA, 72 bp, synthetic construct
  misc_feature 1..72: note = Synthetic: 305_Human_monoMut_C35T_n1
  source 1..72: mol_type = other DNA
gggggaggctgctggtgaatattaaccaaggtcatcccagttatcggaggagcaaacaggggctaagtccac

SEQ ID NO: 189 - DNA, 72 bp, synthetic construct
  misc_feature 1..72: note = Synthetic: 308_Human_monoMut_C36T_n1
  source 1..72: mol_type = other DNA
gggggaggctgctggtgaatattaaccaaggtcactccagttatcggaggagcaaacaggggctaagtccac

SEQ ID NO: 190 - DNA, 72 bp, synthetic construct
  misc_feature 1..72: note = Synthetic: 314_Human_monoMut_C38T_n1
  source 1..72: mol_type = other DNA
gggggaggctgctggtgaatattaaccaaggtcaccctagttatcggaggagcaaacaggggctaagtccac

SEQ ID NO: 191 - DNA, 72 bp, synthetic construct
  misc_feature 1..72: note = Synthetic: 315_Human_monoMut_A39C_n1
  source 1..72: mol_type = other DNA
gggggaggctgctggtgaatattaaccaaggtcacccccgttatcggaggagcaaacaggggctaagtccac

SEQ ID NO: 192 - DNA, 72 bp, synthetic construct
  misc_feature 1..72: note = Synthetic: 316_Human_monoMut_A39G_n1
  source 1..72: mol_type = other DNA
gggggaggctgctggtgaatattaaccaaggtcaccccggttatcggaggagcaaacaggggctaagtccac

SEQ ID NO: 193 - DNA, 72 bp, synthetic construct
  misc_feature 1..72: note = Synthetic: 317_Human_monoMut_A39T_n1
  source 1..72: mol_type = other DNA
gggggaggctgctggtgaatattaaccaaggtcacccctgttatcggaggagcaaacaggggctaagtccac

SEQ ID NO: 194 - DNA, 72 bp, synthetic construct
  misc_feature 1..72: note = Synthetic: 325_Human_monoMut_T42C_n1
  source 1..72: mol_type = other DNA
gggggaggctgctggtgaatattaaccaaggtcaccccagtcatcggaggagcaaacaggggctaagtccac

SEQ ID NO: 195 - DNA, 72 bp, synthetic construct
  misc_feature 1..72: note = Synthetic: 328_Human_monoMut_A43G_n1
  source 1..72: mol_type = other DNA
gggggaggctgctggtgaatattaaccaaggtcaccccagttgtcggaggagcaaacaggggctaagtccac

SEQ ID NO: 196 - DNA, 72 bp, synthetic construct
  misc_feature 1..72: note = Synthetic: 331_Human_monoMut_T44C_n1
  source 1..72: mol_type = other DNA
gggggaggctgctggtgaatattaaccaaggtcaccccagttaccggaggagcaaacaggggctaagtccac

SEQ ID NO: 197 - DNA, 72 bp, synthetic construct
  misc_feature 1..72: note = Synthetic: 332_Human_monoMut_T44G_n1
  source 1..72: mol_type = other DNA
gggggaggctgctggtgaatattaaccaaggtcaccccagttagcggaggagcaaacaggggctaagtccac

SEQ ID NO: 198 - DNA, 72 bp, synthetic construct
  misc_feature 1..72: note = Synthetic: 333_Human_monoMut_C45A_n1
  source 1..72: mol_type = other DNA
gggggaggctgctggtgaatattaaccaaggtcaccccagttataggaggagcaaacaggggctaagtccac

SEQ ID NO: 199 - DNA, 72 bp, synthetic construct
  misc_feature 1..72: note = Synthetic: 334_Human_monoMut_C45G_n1
  source 1..72: mol_type = other DNA
gggggaggctgctggtgaatattaaccaaggtcaccccagttatgggaggagcaaacaggggctaagtccac

SEQ ID NO: 200 - DNA, 72 bp, synthetic construct
  misc_feature 1..72: note = Synthetic: 337_Human_monoMut_G46C_n1
  source 1..72: mol_type = other DNA
gggggaggctgctggtgaatattaaccaaggtcaccccagttatccgaggagcaaacaggggctaagtccac

SEQ ID NO: 201 - DNA, 72 bp, synthetic construct
  misc_feature 1..72: note = Synthetic: 344_Human_monoMut_A48T_n1
  source 1..72: mol_type = other DNA
gggggaggctgctggtgaatattaaccaaggtcaccccagttatcggtggagcaaacaggggctaagtccac

SEQ ID NO: 202 - DNA, 72 bp, synthetic construct
  misc_feature 1..72: note = Synthetic: 345_Human_monoMut_G49A_n1
  source 1..72: mol_type = other DNA
gggggaggctgctggtgaatattaaccaaggtcaccccagttatcggaagagcaaacaggggctaagtccac

SEQ ID NO: 203 - DNA, 72 bp, synthetic construct
  misc_feature 1..72: note = Synthetic: 346_Human_monoMut_G49C_n1
  source 1..72: mol_type = other DNA
gggggaggctgctggtgaatattaaccaaggtcaccccagttatcggacgagcaaacaggggctaagtccac

SEQ ID NO: 204 - DNA, 72 bp, synthetic construct
  misc_feature 1..72: note = Synthetic: 347_Human_monoMut_G49T_n1
  source 1..72: mol_type = other DNA
gggggaggctgctggtgaatattaaccaaggtcaccccagttatcggatgagcaaacaggggctaagtccac

SEQ ID NO: 205 - DNA, 72 bp, synthetic construct
  misc_feature 1..72: note = Synthetic: 351_Human_monoMut_A51C_n1
  source 1..72: mol_type = other DNA
gggggaggctgctggtgaatattaaccaaggtcaccccagttatcggaggcgcaaacaggggctaagtccac

SEQ ID NO: 206 - DNA, 72 bp, synthetic construct
  misc_feature 1..72: note = Synthetic: 353_Human_monoMut_A51T_n1
  source 1..72: mol_type = other DNA
gggggaggctgctggtgaatattaaccaaggtcaccccagttatcggaggtgcaaacaggggctaagtccac

SEQ ID NO: 207 - DNA, 72 bp, synthetic construct
  misc_feature 1..72: note = Synthetic: 354_Human_monoMut_G52A_n1
  source 1..72: mol_type = other DNA
gggggaggctgctggtgaatattaaccaaggtcaccccagttatcggaggaacaaacaggggctaagtccac

SEQ ID NO: 208 - DNA, 72 bp, synthetic construct
  misc_feature 1..72: note = Synthetic: 356_Human_monoMut_G52T_n1
  source 1..72: mol_type = other DNA
gggggaggctgctggtgaatattaaccaaggtcaccccagttatcggaggatcaaacaggggctaagtccac

SEQ ID NO: 209 - DNA, 72 bp, synthetic construct
  misc_feature 1..72: note = Synthetic: 371_Human_monoMut_C57T_n1
  source 1..72: mol_type = other DNA
gggggaggctgctggtgaatattaaccaaggtcaccccagttatcggaggagcaaataggggctaagtccac

SEQ ID NO: 210 - DNA, 348 bp, synthetic construct
  misc_feature 1..348: note = Synthetic: hAAT core - core promoter sequence from human A1AT gene
  source 1..348: mol_type = other DNA
gatcttgctaccagtggaacagccactaaggattctgcagtgagagcagagggccagctaagtggtactctcccagagactgtctgactcacgccaccccctccaccttggacacaggacgctgtggtttctgagccaggtacaatgactcctttcggtaagtgcagtggaagctgtacactgcccaggcaaagcgtccgggcagcgtaggcgggcgactcagatcccagccagtggacttagcccctgtttgctcctccgataactggggtgaccttggttaatattcaccagcagcctcccccgttgcccctctggatccactgcttaaatacggacgaggacagg

SEQ ID NO: 211 - DNA, 202 bp, synthetic construct
  misc_feature 1..202: note = Synthetic: TTRm promoter
  source 1..202: mol_type = other DNA
gtctgtctgcacatttcgtagagcgagtgttccgatactctaatctccctaggcaaggttcatatttgtgtaggttacttattctccttttgttgactaagtcaataatcagaatcagcaggtttggagtcagcttggcagggatcagcagcctgggttggaaggagggggtataaaagccccttcaccaggagaagccgtc

SEQ ID NO: 212 - DNA, 348 bp, synthetic construct
  misc_feature 1..348: note = Synthetic: hAAT_core_C06
  source 1..348: mol_type = other DNA
gatcttgctaccagtggaacagccactaaggattctgcagtgagagcagagggccagctaagtggtactctcccagagactgtctgactcatgccaccccctccaccttggacacaggacactgtggtttctgagccaggtacaatgactccttttggtaagtgcagtggaagctgtacactgcccaggcaaagtgtccgggcagcgtaggcgggcgactcagatcccagccagtggacttagcccctgtttgctcctccgataactggggtgaccttggttaatattcaccagcagcctcccccgttgcccctctggatccactgcttaaatacggacgaggacagg

SEQ ID NO: 213 - DNA, 348 bp, synthetic construct
  misc_feature 1..348: note = Synthetic: hAAT_core_C07
  source 1..348: mol_type = other DNA
gatcttgctaccagtggaacagccactaaggattctgcagtgagagcagagggccagctaagtggtactctcccagagactgtctgactcacgccaccccctccaccttggacacaggacgctgtggtttctgagccaggtacaatgactcctttcggtaagtgcagtggaagctgtacactgcccaggcaaagcgtccgggcagcgtaggcgggcgactcagatcccagccagtggacttagcccctgtttgctcctctgataactggggtgaccttggttaatattcaccagcagcctcccctgttgcccctctggatccactgcttaaatacggacaaggacagg

SEQ ID NO: 214 - DNA, 348 bp, synthetic construct
  misc_feature 1..348: note = Synthetic: hAAT_core_C08
  source 1..348: mol_type = other DNA
gatcttgctaccagtggaacagccactaaggattctgcagtgagagcagagggccagctaagtggtactctcccagagactgtctgactcacgccaccccctccaccttggacacaggacgctgtggtttctgagccaggtacaatgactcctttcggtaagtgcagtggaagctgtacactgcccaggcaaagcgtctgggcagcataggcaggcgactcagatcccagccagtggacttagcccctgtttgctcctccgataactggggtgaccttggttaatattcaccagcagcctcccccgttgcccctctggatccactgcttaaatacggacgaggacagg

SEQ ID NO: 215 - DNA, 348 bp, synthetic construct
  misc_feature 1..348: note = Synthetic: hAAT_core_C09
  source 1..348: mol_type = other DNA
gatcttgctaccagtggaacagccactaaggattctgcagtgagagcagagggccagctaagtggtactctcccagagactgtctgactcacgccaccccctccaccttggacacaggacgctgtggtttctgagccaggtacaatgactcctttcggtaagtgcagtggaagctgtacactgcccaggcaaagcgtccgggcagcgtaggcgggcgactcagatcccagccagtggacttagcccctgtttgctcctctgataactggggtgaccttggttaatattcaccagcagcctcccccgttgcccctctggatccactgcttaaatacagacgaggacagg

SEQ ID NO: 216 - DNA, 348 bp, synthetic construct; identical to SEQ ID NO: 215
  misc_feature 1..348: note = Synthetic: hAAT_core_C10
  source 1..348: mol_type = other DNA

SEQ ID NO: 217 - DNA, 348 bp, synthetic construct; identical to SEQ ID NO: 215
  misc_feature 1..348: note = Synthetic: hAAT_core_truncated
  source 1..348: mol_type = other DNA

SEQ ID NO: 218 - DNA, 72 bp, synthetic construct
  misc_feature 1..72: note = Synthetic: 375_Human_monoMut_G59A_n1
  source 1..72: mol_type = other DNA
gggggaggctgctggtgaatattaaccaaggtcaccccagttatcggaggagcaaacaagggctaagtccac

SEQ ID NO: 219 - DNA, 72 bp, synthetic construct
  misc_feature 1..72: note = Synthetic: 380_Human_monoMut_G60T_n1
  source 1..72: mol_type = other DNA
gggggaggctgctggtgaatattaaccaaggtcaccccagttatcggaggagcaaacagtggctaagtccac

SEQ ID NO: 220 - DNA, 72 bp, synthetic construct
  misc_feature 1..72: note = Synthetic: 381_Human_monoMut_G61A_n1
  source 1..72: mol_type = other DNA
gggggaggctgctggtgaatattaaccaaggtcaccccagttatcggaggagcaaacaggagctaagtccac

SEQ ID NO: 221 - DNA, 72 bp, synthetic construct
  misc_feature 1..72: note = Synthetic: 383_Human_monoMut_G61T_n1
  source 1..72: mol_type = other DNA
gggggaggctgctggtgaatattaaccaaggtcaccccagttatcggaggagcaaacaggtgctaagtccac

SEQ ID NO: 222 - DNA, 72 bp, synthetic construct
  misc_feature 1..72: note = Synthetic: 386_Human_monoMut_G62T_n1
  source 1..72: mol_type = other DNA
gggggaggctgctggtgaatattaaccaaggtcaccccagttatcggaggagcaaacagggtctaagtccac

SEQ ID NO: 223 - DNA, 72 bp, synthetic construct
  misc_feature 1..72: note = Synthetic: 390_Human_monoMut_T64A_n1
  source 1..72: mol_type = other DNA
gggggaggctgctggtgaatattaaccaaggtcaccccagttatcggaggagcaaacaggggcaaagtccac

SEQ ID NO: 224 - DNA, 72 bp, synthetic construct
  misc_feature 1..72: note = Synthetic: 392_Human_monoMut_T64G_n1
  source 1..72: mol_type = other DNA
gggggaggctgctggtgaatattaaccaaggtcaccccagttatcggaggagcaaacaggggcgaagtccac

SEQ ID NO: 225 - DNA, 72 bp, synthetic construct
  misc_feature 1..72: note = Synthetic: 394_Human_monoMut_A65G_n1
  source 1..72: mol_type = other DNA
gggggaggctgctggtgaatattaaccaaggtcaccccagttatcggaggagcaaacaggggctgagtccac

SEQ ID NO: 226 - DNA, 72 bp, synthetic construct
  misc_feature 1..72: note = Synthetic: 405_Human_monoMut_C69A_n1
  source 1..72: mol_type = other DNA
gggggaggctgctggtgaatattaaccaaggtcaccccagttatcggaggagcaaacaggggctaagtacac

SEQ ID NO: 227 - DNA, 72 bp, synthetic construct
  misc_feature 1..72: note = Synthetic: 414_Human_monoMut_C72A_n1
  source 1..72: mol_type = other DNA
gggggaggctgctggtgaatattaaccaaggtcaccccagttatcggaggagcaaacaggggctaagtccaa

SEQ ID NO: 228 - DNA, 72 bp, synthetic construct
  misc_feature 1..72: note = Synthetic: 415_Human_monoMut_C72G_n1
  source 1..72: mol_type = other DNA
gggggaggctgctggtgaatattaaccaaggtcaccccagttatcggaggagcaaacaggggctaagtccag

SEQ ID NO: 229 - DNA, 72 bp, synthetic construct
  misc_feature 1..72: note = Synthetic: 421_Human_diMut_GG1CC_n1
  source 1..72: mol_type = other DNA
ccgggaggctgctggtgaatattaaccaaggtcaccccagttatcggaggagcaaacaggggctaagtccac

SEQ ID NO: 230 - DNA, 72 bp, synthetic construct
  misc_feature 1..72: note = Synthetic: 427_Human_diMut_GG2AC_n1
  source 1..72: mol_type = other DNA
gacggaggctgctggtgaatattaaccaaggtcaccccagttatcggaggagcaaacaggggctaagtccac

SEQ ID NO: 231 - DNA, 72 bp, synthetic construct
  misc_feature 1..72: note = Synthetic: 429_Human_diMut_GG2CA_n1
  source 1..72: mol_type = other DNA
gcaggaggctgctggtgaatattaaccaaggtcaccccagttatcggaggagcaaacaggggctaagtccac

SEQ ID NO: 232 - DNA, 72 bp, synthetic construct
  misc_feature 1..72: note = Synthetic: 430_Human_diMut_GG2CC_n1
  source 1..72: mol_type = other DNA
gccggaggctgctggtgaatattaaccaaggtcaccccagttatcggaggagcaaacaggggctaagtccac

SEQ ID NO: 233 - DNA, 72 bp, synthetic construct
  misc_feature 1..72: note = Synthetic: 439_Human_diMut_GG3CC_n1
  source 1..72: mol_type = other DNA
ggccgaggctgctggtgaatattaaccaaggtcaccccagttatcggaggagcaaacaggggctaagtccac

SEQ ID NO: 234 - DNA, 72 bp, synthetic construct
  misc_feature 1..72: note = Synthetic: 440_Human_diMut_GG3CT_n1
  source 1..72: mol_type = other DNA
ggctgaggctgctggtgaatattaaccaaggtcaccccagttatcggaggagcaaacaggggctaagtccac

SEQ ID NO: 235 - DNA, 72 bp, synthetic construct
  misc_feature 1..72: note = Synthetic: 443_Human_diMut_GG3TT_n1
  source 1..72: mol_type = other DNA
ggttgaggctgctggtgaatattaaccaaggtcaccccagttatcggaggagcaaacaggggctaagtccac

SEQ ID NO: 236 - DNA, 72 bp, synthetic construct
  misc_feature 1..72: note = Synthetic: 444_Human_diMut_GG4AA_n1
  source 1..72: mol_type = other DNA
gggaaaggctgctggtgaatattaaccaaggtcaccccagttatcggaggagcaaacaggggctaagtccac

SEQ ID NO: 237 - DNA, 72 bp, synthetic construct
  misc_feature 1..72: note = Synthetic: 447_Human_diMut_GG4CA_n1
  source 1..72: mol_type = other DNA
gggcaaggctgctggtgaatattaaccaaggtcaccccagttatcggaggagcaaacaggggctaagtccac

SEQ ID NO: 238 - DNA, 72 bp, synthetic construct
  misc_feature 1..72: note = Synthetic: 448_Human_diMut_GG4CC_n1
  source 1..72: mol_type = other DNA
gggccaggctgctggtgaatattaaccaaggtcaccccagttatcggaggagcaaacaggggctaagtccac

SEQ ID NO: 239 - DNA, 72 bp, synthetic construct
  misc_feature 1..72: note = Synthetic: 452_Human_diMut_GG4TT_n1
  source 1..72: mol_type = other DNA
gggttaggctgctggtgaatattaaccaaggtcaccccagttatcggaggagcaaacaggggctaagtccac

SEQ ID NO: 240 - DNA, 72 bp, synthetic construct
  misc_feature 1..72: note = Synthetic: 453_Human_diMut_GA5AC_n1
  source 1..72: mol_type = other DNA
ggggacggctgctggtgaatattaaccaaggtcaccccagttatcggaggagcaaacaggggctaagtccac

SEQ ID NO: 241 - DNA, 72 bp, synthetic construct
  misc_feature 1..72: note = Synthetic: 456_Human_diMut_GA5CC_n1
  source 1..72: mol_type = other DNA
ggggccggctgctggtgaatattaaccaaggtcaccccagttatcggaggagcaaacaggggctaagtccac

SEQ ID NO: 242 - DNA, 72 bp, synthetic construct
  misc_feature 1..72: note = Synthetic: 461_Human_diMut_GA5TT_n1
  source 1..72: mol_type = other DNA
ggggttggctgctggtgaatattaaccaaggtcaccccagttatcggaggagcaaacaggggctaagtccac

SEQ ID NO: 243 - DNA, 72 bp, synthetic construct
  misc_feature 1..72: note = Synthetic: 462_Human_diMut_AG6CA_n1
  source 1..72: mol_type = other DNA
gggggcagctgctggtgaatattaaccaaggtcaccccagttatcggaggagcaaacaggggctaagtccac

SEQ ID NO: 244 - DNA, 72 bp, synthetic construct
  misc_feature 1..72: note = Synthetic: 464_Human_diMut_AG6CT_n1
  source 1..72: mol_type = other DNA
gggggctgctgctggtgaatattaaccaaggtcaccccagttatcggaggagcaaacaggggctaagtccac

SEQ ID NO: 245 - DNA, 72 bp, synthetic construct
  misc_feature 1..72: note = Synthetic: 465_Human_diMut_AG6GA_n1
  source 1..72: mol_type = other DNA
ggggggagctgctggtgaatattaaccaaggtcaccccagttatcggaggagcaaacaggggctaagtccac

SEQ ID NO: 246 - DNA, 72 bp, synthetic construct
  misc_feature 1..72: note = Synthetic: 468_Human_diMut_AG6TA_n1
  source 1..72: mol_type = other DNA
gggggtagctgctggtgaatattaaccaaggtcaccccagttatcggaggagcaaacaggggctaagtccac

SEQ ID NO: 247 - DNA, 72 bp, synthetic construct
  misc_feature 1..72: note = Synthetic: 469_Human_diMut_AG6TC_n1
  source 1..72: mol_type = other DNA
gggggtcgctgctggtgaatattaaccaaggtcaccccagttatcggaggagcaaacaggggctaagtccac

SEQ ID NO: 248 - DNA, 72 bp, synthetic construct
  misc_feature 1..72: note = Synthetic: 470_Human_diMut_AG6TT_n1
  source 1..72: mol_type = other DNA
gggggttgctgctggtgaatattaaccaaggtcaccccagttatcggaggagcaaacaggggctaagtccac

SEQ ID NO: 249 - DNA, 72 bp, synthetic construct
  misc_feature 1..72: note = Synthetic: 471_Human_diMut_GG7AA_n1
  source 1..72: mol_type = other DNA
gggggaaactgctggtgaatattaaccaaggtcaccccagttatcggaggagcaaacaggggctaagtccac

SEQ ID NO: 250 - DNA, 72 bp, synthetic construct
  misc_feature 1..72: note = Synthetic: 472_Human_diMut_GG7AC_n1
  source 1..72: mol_type = other DNA
gggggaacctgctggtgaatattaaccaaggtcaccccagttatcggaggagcaaacaggggctaagtccac

SEQ ID NO: 251 - DNA, 72 bp, synthetic construct
  misc_feature 1..72: note = Synthetic: 473_Human_diMut_GG7AT_n1
  source 1..72: mol_type = other DNA
gggggaatctgctggtgaatattaaccaaggtcaccccagttatcggaggagcaaacaggggctaagtccac

SEQ ID NO: 252 - DNA, 72 bp, synthetic construct
  misc_feature 1..72: note = Synthetic: 475_Human_diMut_GG7CC_n1
  source 1..72: mol_type = other DNA
gggggaccctgctggtgaatattaaccaaggtcaccccagttatcggaggagcaaacaggggctaagtccac

SEQ ID NO: 253 - DNA, 72 bp, synthetic construct
  misc_feature 1..72: note = Synthetic: 478_Human_diMut_GG7TC_n1
  source 1..72: mol_type = other DNA
gggggatcctgctggtgaatattaaccaaggtcaccccagttatcggaggagcaaacaggggctaagtccac

SEQ ID NO: 254 - DNA, 72 bp, synthetic construct
  misc_feature 1..72: note = Synthetic: 482_Human_diMut_GC8AT_n1
  source 1..72: mol_type = other DNA
gggggagattgctggtgaatattaaccaaggtcaccccagttatcggaggagcaaacaggggctaagtccac

SEQ ID NO: 255 - DNA, 72 bp, synthetic construct
  misc_feature 1..72: note = Synthetic: 483_Human_diMut_GC8CA_n1
  source 1..72: mol_type = other DNA
gggggagcatgctggtgaatattaaccaaggtcaccccagttatcggaggagcaaacaggggctaagtccac

SEQ ID NO: 256 - DNA, 72 bp, synthetic construct
  misc_feature 1..72: note = Synthetic: 484_Human_diMut_GC8CG_n1
  source 1..72: mol_type = other DNA
gggggagcgtgctggtgaatattaaccaaggtcaccccagttatcggaggagcaaacaggggctaagtccac

SEQ ID NO: 257 - DNA, 72 bp, synthetic construct
  misc_feature 1..72: note = Synthetic: 488_Human_diMut_GC8TT_n1
  source 1..72: mol_type = other DNA
gggggagtttgctggtgaatattaaccaaggtcaccccagttatcggaggagcaaacaggggctaagtccac

SEQ ID NO: 258 - DNA, 72 bp, synthetic construct
  misc_feature 1..72: note = Synthetic: 490_Human_diMut_CT9AC_n1
  source 1..72: mol_type = other DNA
gggggaggacgctggtgaatattaaccaaggtcaccccagttatcggaggagcaaacaggggctaagtccac

SEQ ID NO: 259 - DNA, 72 bp, synthetic construct
  misc_feature 1..72: note = Synthetic: 491_Human_diMut_CT9AG_n1
  source 1..72: mol_type = other DNA
gggggaggaggctggtgaatattaaccaaggtcaccccagttatcggaggagcaaacaggggctaagtccac

SEQ ID NO: 260 - DNA, 72 bp, synthetic construct
  misc_feature 1..72: note = Synthetic: 492_Human_diMut_CT9GA_n1
  source 1..72: mol_type = other DNA
gggggagggagctggtgaatattaaccaaggtcaccccagttatcggaggagcaaacaggggctaagtccac

SEQ ID NO: 261 - DNA, 72 bp, synthetic construct
  misc_feature 1..72: note = Synthetic: 493_Human_diMut_CT9GC_n1
  source 1..72: mol_type = other DNA
gggggagggcgctggtgaatattaaccaaggtcaccccagttatcggaggagcaaacaggggctaagtccac

SEQ ID NO: 262 - DNA, 72 bp, synthetic construct
  misc_feature 1..72: note = Synthetic: 494_Human_diMut_CT9GG_n1
  source 1..72: mol_type = other DNA
gggggagggggctggtgaatattaaccaaggtcaccccagttatcggaggagcaaacaggggctaagtccac

SEQ ID NO: 263 - DNA, 72 bp, synthetic construct
  misc_feature 1..72: note = Synthetic: 495_Human_diMut_CT9TA_n1
  source 1..72: mol_type = other DNA
gggggaggtagctggtgaatattaaccaaggtcaccccagttatcggaggagcaaacaggggctaagtccac

SEQ ID NO: 264 - DNA, 72 bp, synthetic construct
  misc_feature 1..72: note = Synthetic: 496_Human_diMut_CT9TC_n1
  source 1..72: mol_type = other DNA
gggggaggtcgctggtgaatattaaccaaggtcaccccagttatcggaggagcaaacaggggctaagtccac

SEQ ID NO: 265 - DNA, 72 bp, synthetic construct
  misc_feature 1..72: note = Synthetic: 502_Human_diMut_TG10CC_n1
  source 1..72: mol_type = other DNA
gggggaggcccctggtgaatattaaccaaggtcaccccagttatcggaggagcaaacaggggctaagtccac

SEQ ID NO: 266 - DNA, 72 bp, synthetic construct
  misc_feature 1..72: note = Synthetic: 503_Human_diMut_TG10CT_n1
  source 1..72: mol_type = other DNA
gggggaggcctctggtgaatattaaccaaggtcaccccagttatcggaggagcaaacaggggctaagtccac

SEQ ID NO: 267 - DNA, 72 bp, synthetic construct
  misc_feature 1..72: note = Synthetic: 504_Human_diMut_TG10GA_n1
  source 1..72: mol_type = other DNA
gggggaggcgactggtgaatattaaccaaggtcaccccagttatcggaggagcaaacaggggctaagtccac

SEQ ID NO: 268 - DNA, 72 bp, synthetic construct
  misc_feature 1..72: note = Synthetic: 506_Human_diMut_TG10GT_n1
  source 1..72: mol_type = other DNA
gggggaggcgtctggtgaatattaaccaaggtcaccccagttatcggaggagcaaacaggggctaagtccac

SEQ ID NO: 269 - DNA, 72 bp, synthetic construct
  misc_feature 1..72: note = Synthetic: 507_Human_diMut_GC11AA_n1
  source 1..72: mol_type = other DNA
gggggaggctaatggtgaatattaaccaaggtcaccccagttatcggaggagcaaacaggggctaagtccac

SEQ ID NO: 270 - DNA, 72 bp, synthetic construct
  misc_feature 1..72: note = Synthetic: 510_Human_diMut_GC11CA_n1
  source 1..72: mol_type = other DNA
gggggaggctcatggtgaatattaaccaaggtcaccccagttatcggaggagcaaacaggggctaagtccac

SEQ ID NO: 271 - DNA, 72 bp, synthetic construct
  misc_feature 1..72: note = Synthetic: 511_Human_diMut_GC11CG_n1
  source 1..72: mol_type = other DNA
gggggaggctcgtggtgaatattaaccaaggtcaccccagttatcggaggagcaaacaggggctaagtccac

SEQ ID NO: 272 - DNA, 72 bp, synthetic construct
  misc_feature 1..72: note = Synthetic: 512_Human_diMut_GC11CT_n1
  source 1..72: mol_type = other DNA
gggggaggctcttggtgaatattaaccaaggtcaccccagttatcggaggagcaaacaggggctaagtccac

SEQ ID NO: 273 - DNA, 72 bp, synthetic construct
  misc_feature 1..72: note = Synthetic: 516_Human_diMut_CT12AA_n1
  source 1..72: mol_type = other DNA
gggggaggctgaaggtgaatattaaccaaggtcaccccagttatcggaggagcaaacaggggctaagtccac

SEQ ID NO: 274 - DNA, 72 bp, synthetic construct
  misc_feature 1..72: note = Synthetic: 517_Human_diMut_CT12AC_n1
  source 1..72: mol_type = other DNA
gggggaggctgacggtgaatattaaccaaggtcaccccagttatcggaggagcaaacaggggctaagtccac

SEQ ID NO: 275 - DNA, 72 bp, synthetic construct
  misc_feature 1..72: note = Synthetic: 521_Human_diMut_CT12GG_n1
  source 1..72: mol_type = other DNA
gggggaggctgggggtgaatattaaccaaggtcaccccagttatcggaggagcaaacaggggctaagtccac

SEQ ID NO: 276 - DNA, 72 bp, synthetic construct
  misc_feature 1..72: note = Synthetic: 522_Human_diMut_CT12TA_n1
  source 1..72: mol_type = other DNA
gggggaggctgtaggtgaatattaaccaaggtcaccccagttatcggaggagcaaacaggggctaagtccac

SEQ ID NO: 277 - DNA, 72 bp, synthetic construct
  misc_feature 1..72: note = Synthetic: 523_Human_diMut_CT12TC_n1
  source 1..72: mol_type = other DNA
gggggaggctgtcggtgaatattaaccaaggtcaccccagttatcggaggagcaaacaggggctaagtccac

SEQ ID NO: 278 - DNA, 72 bp, synthetic construct
  misc_feature 1..72: note = Synthetic: 524_Human_diMut_CT12TG_n1
  source 1..72: mol_type = other DNA
gggggaggctgtgggtgaatattaaccaaggtcaccccagttatcggaggagcaaacaggggctaagtccac

SEQ ID NO: 279 - DNA, 72 bp, synthetic construct
  misc_feature 1..72: note = Synthetic: 528_Human_diMut_TG13CA_n1
  source 1..72: mol_type = other DNA
gggggaggctgccagtgaatattaaccaaggtcaccccagttatcggaggagcaaacaggggctaagtccac

SEQ ID NO: 280 - DNA, 72 bp, synthetic construct
  misc_feature 1..72: note = Synthetic: 544_Human_diMut_GT15AC_n1
  source 1..72: mol_type = other DNA
gggggaggctgctgacgaatattaaccaaggtcaccccagttatcggaggagcaaacaggggctaagtccac

SEQ ID NO: 281 - DNA, 72 bp, synthetic construct
  misc_feature 1..72: note = Synthetic: 549_Human_diMut_GT15TA_n1
  source 1..72: mol_type = other DNA
gggggaggctgctgtagaatattaaccaaggtcaccccagttatcggaggagcaaacaggggctaagtccac

SEQ ID NO: 282 - DNA, 72 bp, synthetic construct
  misc_feature 1..72: note = Synthetic: 551_Human_diMut_GT15TG_n1
  source 1..72: mol_type = other DNA
gggggaggctgctgtggaatattaaccaaggtcaccccagttatcggaggagcaaacaggggctaagtccac

SEQ ID NO: 283 - DNA, 72 bp, synthetic construct
  misc_feature 1..72: note = Synthetic: 552_Human_diMut_TG16AA_n1
  source 1..72: mol_type = other DNA
gggggaggctgctggaaaatattaaccaaggtcaccccagttatcggaggagcaaacaggggctaagtccac

SEQ ID NO: 284 - DNA, 72 bp, synthetic construct
  misc_feature 1..72: note = Synthetic: 553_Human_diMut_TG16AC_n1
  source 1..72: mol_type = other DNA
gggggaggctgctggacaatattaaccaaggtcaccccagttatcggaggagcaaacaggggctaagtccac

SEQ ID NO: 285 - DNA, 72 bp, synthetic construct
  misc_feature 1..72: note = Synthetic: 554_Human_diMut_TG16AT_n1
  source 1..72: mol_type = other DNA
gggggaggctgctggataatattaaccaaggtcaccccagttatcggaggagcaaacaggggctaagtccac

SEQ ID NO: 286 - DNA, 72 bp, synthetic construct
  misc_feature 1..72: note = Synthetic: 555_Human_diMut_TG16CA_n1
  source 1..72: mol_type = other DNA
gggggaggctgctggcaaatattaaccaaggtcaccccagttatcggaggagcaaacaggggctaagtccac

SEQ ID NO: 287 - DNA, 72 bp, synthetic construct
  misc_feature 1..72: note = Synthetic: 557_Human_diMut_TG16CT_n1
  source 1..72: mol_type = other DNA
gggggaggctgctggctaatattaaccaaggtcaccccagttatcggaggagcaaacaggggctaagtccac

SEQ ID NO: 288 - DNA, 72 bp, synthetic construct
  misc_feature 1..72: note = Synthetic: 558_Human_diMut_TG16GA_n1
  source 1..72: mol_type = other DNA
gggggaggctgctgggaaatattaaccaaggtcaccccagttatcggaggagcaaacaggggctaagtccac

SEQ ID NO: 289 - DNA, 72 bp, synthetic construct
  misc_feature 1..72: note = Synthetic: 561_Human_diMut_GA17AC_n1
  source 1..72: mol_type = other DNA
gggggaggctgctggtacatattaaccaaggtcaccccagttatcggaggagcaaacaggggctaagtccac

SEQ ID NO: 290 - DNA, 72 bp, synthetic construct
  misc_feature 1..72: note = Synthetic: 563_Human_diMut_GA17AT_n1
  source 1..72: mol_type = other DNA
gggggaggctgctggtatatattaaccaaggtcaccccagttatcggaggagcaaacaggggctaagtccac

SEQ ID NO: 291 - DNA, 72 bp, synthetic construct
  misc_feature 1..72: note = Synthetic: 565_Human_diMut_GA17CG_n1
  source 1..72: mol_type = other DNA
gggggaggctgctggtcgatattaaccaaggtcaccccagttatcggaggagcaaacaggggctaagtccac

SEQ ID NO: 292 - DNA, 72 bp, synthetic construct
  misc_feature 1..72: note = Synthetic: 568_Human_diMut_GA17TG_n1
  source 1..72: mol_type = other DNA
gggggaggctgctggttgatattaaccaaggtcaccccagttatcggaggagcaaacaggggctaagtccac

SEQ ID NO: 293 - DNA, 72 bp, synthetic construct
  misc_feature 1..72: note = Synthetic: 572_Human_diMut_AA18CT_n1
  source 1..72: mol_type = other DNA
gggggaggctgctggtgcttattaaccaaggtcaccccagttatcggaggagcaaacaggggctaagtccac

SEQ ID NO: 294 - DNA, 72 bp, synthetic construct
  misc_feature 1..72: note = Synthetic: 578_Human_diMut_AA18TT_n1
  source 1..72: mol_type = other DNA
gggggaggctgctggtgtttattaaccaaggtcaccccagttatcggaggagcaaacaggggctaagtccac

SEQ ID NO: 295 - DNA, 72 bp, synthetic construct
  misc_feature 1..72: note = Synthetic: 583_Human_diMut_AT19GC_n1
  source 1..72: mol_type = other DNA
gggggaggctgctggtgagcattaaccaaggtcaccccagttatcggaggagcaaacaggggctaagtccac

SEQ ID NO: 296 - DNA, 72 bp, synthetic construct
  misc_feature 1..72: note = Synthetic: 584_Human_diMut_AT19GG_n1
  source 1..72: mol_type = other DNA
gggggaggctgctggtgaggattaaccaaggtcaccccagttatcggaggagcaaacaggggctaagtccac

SEQ ID NO: 297 - DNA, 72 bp, synthetic construct
  misc_feature 1..72: note = Synthetic: 585_Human_diMut_AT19TA_n1
  source 1..72: mol_type = other DNA
gggggaggctgctggtgataattaaccaaggtcaccccagttatcggaggagcaaacaggggctaagtccac

SEQ ID NO: 298 - DNA, 72 bp, synthetic construct
  misc_feature 1..72: note = Synthetic: 586_Human_diMut_AT19TC_n1
  source 1..72: mol_type = other DNA
gggggaggctgctggtgatcattaaccaaggtcaccccagttatcggaggagcaaacaggggctaagtccac

SEQ ID NO: 299 - DNA, 72 bp, synthetic construct
  misc_feature 1..72: note = Synthetic: 587_Human_diMut_AT19TG_n1
  source 1..72: mol_type = other DNA
gggggaggctgctggtgatgattaaccaaggtcaccccagttatcggaggagcaaacaggggctaagtccac

SEQ ID NO: 300 - DNA, 72 bp, synthetic construct
  misc_feature 1..72: note = Synthetic: 589_Human_diMut_TA20AG_n1
  source 1..72: mol_type = other DNA
gggggaggctgctggtgaaagttaaccaaggtcaccccagttatcggaggagcaaacaggggctaagtccac

SEQ ID NO: 301 - DNA, 72 bp, synthetic construct
  misc_feature 1..72: note = Synthetic: 591_Human_diMut_TA20CC_n1
  source 1..72: mol_type = other DNA
gggggaggctgctggtgaaccttaaccaaggtcaccccagttatcggaggagcaaacaggggctaagtccac

SEQ ID NO: 302 - DNA, 72 bp, synthetic construct
  misc_feature 1..72: note = Synthetic: 592_Human_diMut_TA20CG_n1
  source 1..72: mol_type = other DNA
gggggaggctgctggtgaacgttaaccaaggtcaccccagttatcggaggagcaaacaggggctaagtccac

SEQ ID NO: 303 - DNA, 72 bp, synthetic construct
  misc_feature 1..72: note = Synthetic: 593_Human_diMut_TA20CT_n1
  source 1..72: mol_type = other DNA
gggggaggctgctggtgaactttaaccaaggtcaccccagttatcggaggagcaaacaggggctaagtccac

SEQ ID NO: 304 - DNA, 72 bp, synthetic construct
  misc_feature 1..72: note = Synthetic: 596_Human_diMut_TA20GT_n1
  source 1..72: mol_type = other DNA
gggggaggctgctggtgaagtttaaccaaggtcaccccagttatcggaggagcaaacaggggctaagtccac

SEQ ID NO: 305 - DNA, 72 bp, synthetic construct
  misc_feature 1..72: note = Synthetic: 597_Human_diMut_AT21CA_n1
  source 1..72: mol_type = other DNA
gggggaggctgctggtgaatcataaccaaggtcaccccagttatcggaggagcaaacaggggctaagtccac

SEQ ID NO: 306 - DNA, 72 bp, synthetic construct
  misc_feature 1..72: note = Synthetic: 601_Human_diMut_AT21GC_n1
  source 1..72: mol_type = other DNA
gggggaggctgctggtgaatgctaaccaaggtcaccccagttatcggaggagcaaacaggggctaagtccac

SEQ ID NO: 307 - skipped

SEQ ID NO: 308 - DNA, 72 bp, synthetic construct
  misc_feature 1..72: note = Synthetic: 602_Human_diMut_AT21GG_n1
  source 1..72: mol_type = other DNA
gggggaggctgctggtgaatggtaaccaaggtcaccccagttatcggaggagcaaacaggggctaagtccac

SEQ ID NO: 309 - DNA, 72 bp, synthetic construct
  misc_feature 1..72: note = Synthetic: 604_Human_diMut_AT21TC_n1
  source 1..72: mol_type = other DNA
gggggaggctgctggtgaattctaaccaaggtcaccccagttatcggaggagcaaacaggggctaagtccac

SEQ ID NO: 310 - DNA, 72 bp, synthetic construct
  misc_feature 1..72: note = Synthetic: 608_Human_diMut_TT22AG_n1
  source 1..72: mol_type = other DNA
gggggaggctgctggtgaataagaaccaaggtcaccccagttatcggaggagcaaacaggggctaagtccac

SEQ ID NO: 311 - DNA, 72 bp, synthetic construct
  misc_feature 1..72: note = Synthetic: 614_Human_diMut_TT22GG_n1
  source 1..72: mol_type = other DNA
gggggaggctgctggtgaataggaaccaaggtcaccccagttatcggaggagcaaacaggggctaagtccac

SEQ ID NO: 312 - DNA, 72 bp, synthetic construct
  misc_feature 1..72: note = Synthetic: 616_Human_diMut_TA23AG_n1
  source 1..72: mol_type = other DNA
gggggaggctgctggtgaatatagaccaaggtcaccccagttatcggaggagcaaacaggggctaagtccac

SEQ ID NO: 313 - DNA, 72 bp, synthetic construct
  misc_feature 1..72: note = Synthetic: 619_Human_diMut_TA23CG_n1
  source 1..72: mol_type = other DNA
gggggaggctgctggtgaatatcgaccaaggtcaccccagttatcggaggagcaaacaggggctaagtccac

SEQ ID NO: 314 - DNA, 72 bp, synthetic construct
  misc_feature 1..72: note = Synthetic: 621_Human_diMut_TA23GC_n1
  source 1..72: mol_type = other DNA
gggggaggctgctggtgaatatgcaccaaggtcaccccagttatcggaggagcaaacaggggctaagtccac

SEQ ID NO: 315 - DNA, 72 bp, synthetic construct
  misc_feature 1..72: note = Synthetic: 623_Human_diMut_TA23GT_n1
  source 1..72: mol_type = other DNA
gggggaggctgctggtgaatatgtaccaaggtcaccccagttatcggaggagcaaacaggggctaagtccac

SEQ ID NO: 316 - DNA, 72 bp, synthetic construct
  misc_feature 1..72: note = Synthetic: 624_Human_diMut_AA24CC_n1
  source 1..72: mol_type = other DNA
gggggaggctgctggtgaatattccccaaggtcaccccagttatcggaggagcaaacaggggctaagtccac

SEQ ID NO: 317 - DNA, 72 bp, synthetic construct
  misc_feature 1..72: note = Synthetic: 629_Human_diMut_AA24GT_n1
  source 1..72: mol_type = other DNA
gggggaggctgctggtgaatattgtccaaggtcaccccagttatcggaggagcaaacaggggctaagtccac

SEQ ID NO: 318 - DNA, 72 bp, synthetic construct
  misc_feature 1..72: note = Synthetic: 650_Human_diMut_CC26TT_n1
  source 1..72: mol_type = other DNA
gggggaggctgctggtgaatattaattaaggtcaccccagttatcggaggagcaaacaggggctaagtccac

SEQ ID NO: 319 - DNA, 72 bp, synthetic construct
  misc_feature 1..72: note = Synthetic: 667_Human_diMut_AA28TG_n1
  source 1..72: mol_type = other DNA
gggggaggctgctggtgaatattaacctgggtcaccccagttatcggaggagcaaacaggggctaagtccac

SEQ ID NO: 320 - DNA, 72 bp, synthetic construct
  misc_feature 1..72: note = Synthetic: 678_Human_diMut_GG30AA_n1
  source 1..72: mol_type = other DNA
gggggaggctgctggtgaatattaaccaaaatcaccccagttatcggaggagcaaacaggggctaagtccac

SEQ ID NO: 321 - DNA, 72 bp, synthetic construct
  misc_feature 1..72: note = Synthetic: 679_Human_diMut_GG30AC_n1
  source 1..72: mol_type = other DNA
gggggaggctgctggtgaatattaaccaaactcaccccagttatcggaggagcaaacaggggctaagtccac

SEQ ID NO: 322 - DNA, 72 bp, synthetic construct
  misc_feature 1..72: note = Synthetic: 682_Human_diMut_GG30CC_n1
  source 1..72: mol_type = other DNA
gggggaggctgctggtgaatattaaccaacctcaccccagttatcggaggagcaaacaggggctaagtccac

SEQ ID NO: 323 - DNA, 72 bp, synthetic construct
  misc_feature 1..72: note = Synthetic: 688_Human_diMut_GT31AC_n1
  source 1..72: mol_type = other DNA
gggggaggctgctggtgaatattaaccaagaccaccccagttatcggaggagcaaacaggggctaagtccac

SEQ ID NO: 324 - DNA, 72 bp, synthetic construct
  misc_feature 1..72: note = Synthetic: 689_Human_diMut_GT31AG_n1
  source 1..72: mol_type = other DNA
gggggaggctgctggtgaatattaaccaagagcaccccagttatcggaggagcaaacaggggctaagtccac

SEQ ID NO: 325 - DNA, 72 bp, synthetic construct
  misc_feature 1..72: note = Synthetic: 694_Human_diMut_GT31TC_n1
  source 1..72: mol_type = other DNA
gggggaggctgctggtgaatattaaccaagtccaccccagttatcggaggagcaaacaggggctaagtccac

SEQ ID NO: 326 - DNA, 72 bp, synthetic construct
  misc_feature 1..72: note = Synthetic: 698_Human_diMut_TC32AT_n1
  source 1..72: mol_type = other DNA
gggggaggctgctggtgaatattaaccaaggataccccagttatcggaggagcaaacaggggctaagtccac

SEQ ID NO: 327 - DNA, 72 bp, synthetic construct
  misc_feature 1..72: note = Synthetic: 704_Human_diMut_TC32GT_n1
  source 1..72: mol_type = other DNA
gggggaggctgctggtgaatattaaccaagggtaccccagttatcggaggagcaaacaggggctaagtccac

SEQ ID NO: 328 - DNA, 72 bp, synthetic construct
  misc_feature 1..72: note = Synthetic: 705_Human_diMut_CA33AC_n1
  source 1..72: mol_type = other DNA
gggggaggctgctggtgaatattaaccaaggtacccccagttatcggaggagcaaacaggggctaagtccac

SEQ ID NO: 329 - DNA, 72 bp, synthetic construct
  misc_feature 1..72: note = Synthetic: 706_Human_diMut_CA33AG_n1
  source 1..72: mol_type = other DNA
gggggaggctgctggtgaatattaaccaaggtagccccagttatcggaggagcaaacaggggctaagtccac

SEQ ID NO: 330 - DNA, 72 bp, synthetic construct
  misc_feature 1..72: note = Synthetic: 709_Human_diMut_CA33GG_n1
  source 1..72: mol_type = other DNA
gggggaggctgctggtgaatattaaccaaggtggccccagttatcggaggagcaaacaggggctaagtccac

SEQ ID NO: 331 - DNA, 72 bp, synthetic construct
  misc_feature 1..72: note = Synthetic: 720_Human_diMut_AC34TA_n1
  source 1..72: mol_type = other DNA
gggggaggctgctggtgaatattaaccaaggtctacccagttatcggaggagcaaacaggggctaagtccac

SEQ ID NO: 332 - DNA, 72 bp, synthetic construct
  misc_feature 1..72: note = Synthetic: 723_Human_diMut_CC35AA_n1
  source 1..72: mol_type = other DNA
gggggaggctgctggtgaatattaaccaaggtcaaaccagttatcggaggagcaaacaggggctaagtccac

SEQ ID NO: 333 - DNA, 72 bp, synthetic construct
  misc_feature 1..72: note = Synthetic: 728_Human_diMut_CC35GT_n1
  source 1..72: mol_type = other DNA
gggggaggctgctggtgaatattaaccaaggtcagtccagttatcggaggagcaaacaggggctaagtccac

SEQ ID NO: 334 - DNA, 72 bp, synthetic construct
  misc_feature 1..72: note = Synthetic: 733_Human_diMut_CC36AG_n1
  source 1..72: mol_type = other DNA
gggggaggctgctggtgaatattaaccaaggtcacagcagttatcggaggagcaaacaggggctaagtccac

SEQ ID NO: 335 - DNA, 72 bp, synthetic construct
  misc_feature 1..72: note = Synthetic: 734_Human_diMut_CC36AT_n1
  source 1..72: mol_type = other DNA
gggggaggctgctggtgaatattaaccaaggtcacatcagttatcggaggagcaaacaggggctaagtccac

SEQ ID NO: 336 - DNA, 72 bp, synthetic construct
  misc_feature 1..72: note = Synthetic: 736_Human_diMut_CC36GG_n1
  source 1..72: mol_type = other DNA
gggggaggctgctggtgaatattaaccaaggtcacggcagttatcggaggagcaaacaggggctaagtccac

SEQ ID NO: 337 - DNA, 72 bp, synthetic construct
  misc_feature 1..72: note = Synthetic: 737_Human_diMut_CC36GT_n1
  source 1..72: mol_type = other DNA
gggggaggctgctggtgaatattaaccaaggtcacgtcagttatcggaggagcaaacaggggctaagtccac

SEQ ID NO: 338 - DNA, 72 bp, synthetic construct
  misc_feature 1..72: note = Synthetic: 738_Human_diMut_CC36TA_n1
  source 1..72: mol_type = other DNA
gggggaggctgctggtgaatattaaccaaggtcactacagttatcggaggagcaaacaggggctaagtccac

SEQ ID NO: 339 - DNA, 72 bp, synthetic construct
  misc_feature 1..72: note = Synthetic: 739_Human_diMut_CC36TG_n1
  source 1..72: mol_type = other DNA
gggggaggctgctggtgaatattaaccaaggtcactgcagttatcggaggagcaaacaggggctaagtccac

SEQ ID NO: 340 - DNA, 72 bp, synthetic construct
  misc_feature 1..72: note = Synthetic: 740_Human_diMut_CC36TT_n1
  source 1..72: mol_type = other DNA
gggggaggctgctggtgaatattaaccaaggtcacttcagttatcggaggagcaaacaggggctaagtccac

SEQ ID NO: 341 - DNA, 72 bp, synthetic construct
  misc_feature 1..72: note = Synthetic: 741_Human_diMut_CC37AA_n1
  source 1..72: mol_type = other DNA
gggggaggctgctggtgaatattaaccaaggtcaccaaagttatcggaggagcaaacaggggctaagtccac

SEQ ID NO: 342 - DNA, 72 bp, synthetic construct
  misc_feature 1..72: note = Synthetic: 743_Human_diMut_CC37AT_n1
  source 1..72: mol_type = other DNA
gggggaggctgctggtgaatattaaccaaggtcaccatagttatcggaggagcaaacaggggctaagtccac

SEQ ID NO: 343 - DNA, 72 bp, synthetic construct
  misc_feature 1..72: note = Synthetic: 746_Human_diMut_CC37GT_n1
  source 1..72: mol_type = other DNA
gggggaggctgctggtgaatattaaccaaggtcaccgtagttatcggaggagcaaacaggggctaagtccac

SEQ ID NO: 344 - DNA, 72 bp, synthetic construct
  misc_feature 1..72: note = Synthetic: 747_Human_diMut_CC37TA_n1
  source 1..72: mol_type = other DNA
gggggaggctgctggtgaatattaaccaaggtcacctaagttatcggaggagcaaacaggggctaagtccac

SEQ ID NO: 345 - DNA, 72 bp, synthetic construct
  misc_feature 1..72: note = Synthetic: 748_Human_diMut_CC37TG_n1
  source 1..72: mol_type = other DNA
gggggaggctgctggtgaatattaaccaaggtcacctgagttatcggaggagcaaacaggggctaagtccac

SEQ ID NO: 346 - DNA, 72 bp, synthetic construct
  misc_feature 1..72: note = Synthetic: 750_Human_diMut_CA38AC_n1
  source 1..72: mol_type = other DNA
gggggaggctgctggtgaatattaaccaaggtcacccacgttatcggaggagcaaacaggggctaagtccac

SEQ ID NO: 347 - DNA, 72 bp, synthetic construct
  misc_feature 1..72: note = Synthetic: 752_Human_diMut_CA38AT_n1
  source 1..72: mol_type = other DNA
gggggaggctgctggtgaatattaaccaaggtcacccatgttatcggaggagcaaacaggggctaagtccac

SEQ ID NO: 348 - DNA, 72 bp, synthetic construct
  misc_feature 1..72: note = Synthetic: 753_Human_diMut_CA38GC_n1
  source 1..72: mol_type = other DNA
gggggaggctgctggtgaatattaaccaaggtcacccgcgttatcggaggagcaaacaggggctaagtccac

SEQ ID NO: 349 - DNA, 72 bp, synthetic construct
  misc_feature 1..72: note = Synthetic: 754_Human_diMut_CA38GG_n1
  source 1..72: mol_type = other DNA
gggggaggctgctggtgaatattaaccaaggtcacccgggttatcggaggagcaaacaggggctaagtccac

SEQ ID NO: 350 - DNA, 72 bp, synthetic construct
  misc_feature 1..72: note = Synthetic: 755_Human_diMut_CA38GT_n1
  source 1..72: mol_type = other DNA
gggggaggctgctggtgaatattaaccaaggtcacccgtgttatcggaggagcaaacaggggctaagtccac

SEQ ID NO: 351 - DNA, 72 bp, synthetic construct
  misc_feature 1..72: note = Synthetic: 756_Human_diMut_CA38TC_n1
  source 1..72: mol_type = other DNA
gggggaggctgctggtgaatattaaccaaggtcaccctcgttatcggaggagcaaacaggggctaagtccac

SEQ ID NO: 352 - DNA, 72 bp, synthetic construct
  misc_feature 1..72: note = Synthetic: 757_Human_diMut_CA38TG_n1
  source 1..72: mol_type = other DNA
gggggaggctgctggtgaatattaaccaaggtcaccctggttatcggaggagcaaacaggggctaagtccac

SEQ ID NO: 353 - DNA, 72 bp, synthetic construct
  misc_feature 1..72: note = Synthetic: 758_Human_diMut_CA38TT_n1
  source 1..72: mol_type = other DNA
gggggaggctgctggtgaatattaaccaaggtcacccttgttatcggaggagcaaacaggggctaagtccac

SEQ ID NO: 354 - DNA, 72 bp, synthetic construct
  misc_feature 1..72: note = Synthetic: 759_Human_diMut_AG39CA_n1
  source 1..72: mol_type = other DNA
gggggaggctgctggtgaatattaaccaaggtcacccccattatcggaggagcaaacaggggctaagtccac

SEQ ID NO: 355 - DNA, 72 bp, synthetic construct
  misc_feature 1..72: note = Synthetic: 765_Human_diMut_AG39TA_n1
  source 1..72: mol_type = other DNA
gggggaggctgctggtgaatattaaccaaggtcacccctattatcggaggagcaaacaggggctaagtccac

SEQ ID NO: 356 - DNA, 72 bp, synthetic construct
  misc_feature 1..72: note = Synthetic: 766_Human_diMut_AG39TC_n1
  source 1..72: mol_type = other DNA
gggggaggctgctggtgaatattaaccaaggtcacccctcttatcggaggagcaaacaggggctaagtccac

SEQ ID NO: 357 - DNA, 72 bp, synthetic construct
  misc_feature 1..72: note = Synthetic: 767_Human_diMut_AG39TT_n1
  source 1..72: mol_type = other DNA
gggggaggctgctggtgaatattaaccaaggtcaccccttttatcggaggagcaaacaggggctaagtccac

SEQ ID NO: 358 - DNA, 72 bp, synthetic construct
  misc_feature 1..72: note = Synthetic: 772_Human_diMut_GT40CC_n1
  source 1..72: mol_type = other DNA
gggggaggctgctggtgaatattaaccaaggtcaccccacctatcggaggagcaaacaggggctaagtccac

SEQ ID NO: 359 - DNA, 72 bp, synthetic construct
  misc_feature 1..72: note = Synthetic: 776_Human_diMut_GT40TG_n1
  source 1..72: mol_type = other DNA
gggggaggctgctggtgaatattaaccaaggtcaccccatgtatcggaggagcaaacaggggctaagtccac

SEQ ID NO: 360 - DNA, 72 bp, synthetic construct
  misc_feature 1..72: note = Synthetic: 777_Human_diMut_TT41AA_n1
  source 1..72: mol_type = other DNA
gggggaggctgctggtgaatattaaccaaggtcaccccagaaatcggaggagcaaacaggggctaagtccac

SEQ ID NO: 361 - DNA, 72 bp, synthetic construct
  misc_feature 1..72: note = Synthetic: 781_Human_diMut_TT41CC_n1
  source 1..72: mol_type = other DNA
gggggaggctgctggtgaatattaaccaaggtcaccccagccatcggaggagcaaacaggggctaagtccac

SEQ ID NO: 362 - DNA, 72 bp, synthetic construct
  misc_feature 1..72: note = Synthetic: 787_Human_diMut_TA42AG_n1
  source 1..72: mol_type = other DNA
gggggaggctgctggtgaatattaaccaaggtcaccccagtagtcggaggagcaaacaggggctaagtccac

SEQ ID NO: 363 - DNA, 72 bp, synthetic construct
  misc_feature 1..72: note = Synthetic: 790_Human_diMut_TA42CG_n1
  source 1..72: mol_type = other DNA
gggggaggctgctggtgaatattaaccaaggtcaccccagtcgtcggaggagcaaacaggggctaagtccac

SEQ ID NO: 364 - DNA, 72 bp, synthetic construct
  misc_feature 1..72: note = Synthetic: 794_Human_diMut_TA42GT_n1
  source 1..72: mol_type = other DNA
gggggaggctgctggtgaatattaaccaaggtcaccccagtgttcggaggagcaaacaggggctaagtccac

SEQ ID NO: 365 - DNA, 72 bp, synthetic construct
  misc_feature 1..72: note = Synthetic: 795_Human_diMut_AT43CA_n1
  source 1..72: mol_type = other DNA
gggggaggctgctggtgaatattaaccaaggtcaccccagttcacggaggagcaaacaggggctaagtccac

SEQ ID NO: 366 - DNA, 72 bp, synthetic construct
  misc_feature 1..72: note = Synthetic: 799_Human_diMut_AT43GC_n1
  source 1..72: mol_type = other DNA
gggggaggctgctggtgaatattaaccaaggtcaccccagttgccggaggagcaaacaggggctaagtccac

SEQ ID NO: 367 - DNA, 72 bp, synthetic construct
  misc_feature 1..72: note = Synthetic: 802_Human_diMut_AT43TC_n1
  source 1..72: mol_type = other DNA
gggggaggctgctggtgaatattaaccaaggtcaccccagtttccggaggagcaaacaggggctaagtccac

SEQ ID NO: 368 - DNA, 72 bp, synthetic construct
  misc_feature 1..72: note = Synthetic: 806_Human_diMut_TC44AT_n1
  source 1..72: mol_type = other DNA
gggggaggctgctggtgaatattaaccaaggtcaccccagttaatggaggagcaaacaggggctaagtccac

SEQ ID NO: 369 - DNA, 72 bp, synthetic construct
  misc_feature 1..72: note = Synthetic: 807_Human_diMut_TC44CA_n1
  source 1..72: mol_type = other DNA
gggggaggctgctggtgaatattaaccaaggtcaccccagttacaggaggagcaaacaggggctaagtccac

SEQ ID NO: 370 - DNA, 72 bp, synthetic construct
  misc_feature 1..72: note = Synthetic: 811_Human_diMut_TC44GG_n1
  source 1..72: mol_type = other DNA
gggggaggctgctggtgaatattaaccaaggtcaccccagttaggggaggagcaaacaggggctaagtccac

SEQ ID NO: 371 - DNA, 72 bp, synthetic construct
  misc_feature 1..72: note = Synthetic: 815_Human_diMut_CG45AT_n1
  source 1..72: mol_type = other DNA
gggggaggctgctggtgaatattaaccaaggtcaccccagttatatgaggagcaaacaggggctaagtccac

SEQ ID NO: 372 - DNA, 72 bp, synthetic construct
  misc_feature 1..72: note = Synthetic: 818_Human_diMut_CG45GT_n1
  source 1..72: mol_type = other DNA
gggggaggctgctggtgaatattaaccaaggtcaccccagttatgtgaggagcaaacaggggctaagtccac

SEQ ID NO: 373 - DNA, 72 bp, synthetic construct
  misc_feature 1..72: note = Synthetic: 821_Human_diMut_CG45TT_n1
  source 1..72: mol_type = other DNA
gggggaggctgctggtgaatattaaccaaggtcaccccagttatttgaggagcaaacaggggctaagtccac

SEQ ID NO: 374 - DNA, 72 bp, synthetic construct
  misc_feature 1..72: note = Synthetic: 822_Human_diMut_GG46AA_n1
  source 1..72: mol_type = other DNA
gggggaggctgctggtgaatattaaccaaggtcaccccagttatcaaaggagcaaacaggggctaagtccac

SEQ ID NO: 375 - DNA, 72 bp, synthetic construct
  misc_feature 1..72: note = Synthetic: 824_Human_diMut_GG46AT_n1
  source 1..72: mol_type = other DNA
gggggaggctgctggtgaatattaaccaaggtcaccccagttatcataggagcaaacaggggctaagtccac

SEQ ID NO: 376 - DNA, 72 bp, synthetic construct
  misc_feature 1..72: note = Synthetic: 826_Human_diMut_GG46CC_n1
  source 1..72: mol_type = other DNA
gggggaggctgctggtgaatattaaccaaggtcaccccagttatcccaggagcaaacaggggctaagtccac

SEQ ID NO: 377 - DNA, 72 bp, synthetic construct
  misc_feature 1..72: note = Synthetic: 827_Human_diMut_GG46CT_n1
  source 1..72: mol_type = other DNA
gggggaggctgctggtgaatattaaccaaggtcaccccagttatcctaggagcaaacaggggctaagtccac

SEQ ID NO: 378 - DNA, 72 bp, synthetic construct
  misc_feature 1..72: note = Synthetic: 828_Human_diMut_GG46TA_n1
  source 1..72: mol_type = other DNA
gggggaggctgctggtgaatattaaccaaggtcaccccagttatctaaggagcaaacaggggctaagtccac

SEQ ID NO: 379 - DNA, 72 bp, synthetic construct
  misc_feature 1..72: note = Synthetic: 830_Human_diMut_GG46TT_n1
  source 1..72: mol_type = other DNA
gggggaggctgctggtgaatattaaccaaggtcaccccagttatcttaggagcaaacaggggctaagtccac

SEQ ID NO: 380 - DNA, 72 bp, synthetic construct
  misc_feature 1..72: note = Synthetic: 832_Human_diMut_GA47AG_n1
  source 1..72: mol_type = other DNA
gggggaggctgctggtgaatattaaccaaggtcaccccagttatcgagggagcaaacaggggctaagtccac

SEQ ID NO: 381 - DNA, 72 bp, synthetic construct
  misc_feature 1..72: note = Synthetic: 833_Human_diMut_GA47AT_n1
  source 1..72: mol_type = other DNA
gggggaggctgctggtgaatattaaccaaggtcaccccagttatcgatggagcaaacaggggctaagtccac

SEQ ID NO: 382 - DNA, 72 bp, synthetic construct
  misc_feature 1..72: note = Synthetic: 834_Human_diMut_GA47CC_n1
  source 1..72: mol_type = other DNA
gggggaggctgctggtgaatattaaccaaggtcaccccagttatcgccggagcaaacaggggctaagtccac

SEQ ID NO: 383 - DNA, 72 bp, synthetic construct
  misc_feature 1..72: note = Synthetic: 836_Human_diMut_GA47CT_n1
  source 1..72: mol_type = other DNA
gggggaggctgctggtgaatattaaccaaggtcaccccagttatcgctggagcaaacaggggctaagtccac

SEQ ID NO: 384 - DNA, 72 bp, synthetic construct
  misc_feature 1..72: note = Synthetic: 839_Human_diMut_GA47TT_n1
  source 1..72: mol_type = other DNA
gggggaggctgctggtgaatattaaccaaggtcaccccagttatcgttggagcaaacaggggctaagtccac

SEQ ID NO: 385 - DNA, 72 bp, synthetic construct
  misc_feature 1..72: note = Synthetic: 840_Human_diMut_AG48CA_n1
  source 1..72: mol_type = other DNA
gggggaggctgctggtgaatattaaccaaggtcaccccagttatcggcagagcaaacaggggctaagtccac

SEQ ID NO: 386 - DNA, 72 bp, synthetic construct
  misc_feature 1..72: note = Synthetic: 842_Human_diMut_AG48CT_n1
  source 1..72: mol_type = other DNA
gggggaggctgctggtgaatattaaccaaggtcaccccagttatcggctgagcaaacaggggctaagtccac

SEQ ID NO: 387 - DNA, 72 bp, synthetic construct
  misc_feature 1..72: note = Synthetic: 843_Human_diMut_AG48GA_n1
  source 1..72: mol_type = other DNA
gggggaggctgctggtgaatattaaccaaggtcaccccagttatcgggagagcaaacaggggctaagtccac

SEQ ID NO: 388 - DNA, 72 bp, synthetic construct
  misc_feature 1..72: note = Synthetic: 845_Human_diMut_AG48GT_n1
  source 1..72: mol_type = other DNA
gggggaggctgctggtgaatattaaccaaggtcaccccagttatcgggtgagcaaacaggggctaagtccac

SEQ ID NO: 389 - DNA, 72 bp, synthetic construct
  misc_feature 1..72: note = Synthetic: 846_Human_diMut_AG48TA_n1
  source 1..72: mol_type = other DNA
gggggaggctgctggtgaatattaaccaaggtcaccccagttatcggtagagcaaacaggggctaagtccac

SEQ ID NO: 390 - DNA, 72 bp, synthetic construct
  misc_feature 1..72: note = Synthetic: 848_Human_diMut_AG48TT_n1
  source 1..72: mol_type = other DNA
gggggaggctgctggtgaatattaaccaaggtcaccccagttatcggttgagcaaacaggggctaagtccac

SEQ ID NO: 391 - DNA, 72 bp, synthetic construct
  misc_feature 1..72: note = Synthetic: 849_Human_diMut_GG49AA_n1
  source 1..72: mol_type = other DNA
gggggaggctgctggtgaatattaaccaaggtcaccccagttatcggaaaagcaaacaggggctaagtccac

SEQ ID NO: 392 - DNA, 72 bp, synthetic construct
  misc_feature 1..72: note = Synthetic: 850_Human_diMut_GG49AC_n1
  source 1..72: mol_type = other DNA
gggggaggctgctggtgaatattaaccaaggtcaccccagttatcggaacagcaaacaggggctaagtccac

SEQ ID NO: 393 - DNA, 72 bp, synthetic construct
  misc_feature 1..72: note = Synthetic: 851_Human_diMut_GG49AT_n1
  source 1..72: mol_type = other DNA
gggggaggctgctggtgaatattaaccaaggtcaccccagttatcggaatagcaaacaggggctaagtccac

SEQ ID NO: 394 - DNA, 72 bp, synthetic construct
  misc_feature 1..72: note = Synthetic: 852_Human_diMut_GG49CA_n1
  source 1..72: mol_type = other DNA
gggggaggctgctggtgaatattaaccaaggtcaccccagttatcggacaagcaaacaggggctaagtccac

SEQ ID NO: 395 - DNA, 72 bp, synthetic construct
  misc_feature 1..72: note = Synthetic: 853_Human_diMut_GG49CC_n1
  source 1..72: mol_type = other DNA
gggggaggctgctggtgaatattaaccaaggtcaccccagttatcggaccagcaaacaggggctaagtccac

SEQ ID NO: 396 - DNA, 72 bp, synthetic construct
  misc_feature 1..72: note = Synthetic: 854_Human_diMut_GG49CT_n1
  source 1..72: mol_type = other DNA
gggggaggctgctggtgaatattaaccaaggtcaccccagttatcggactagcaaacaggggctaagtccac

SEQ ID NO: 397 - DNA, 72 bp, synthetic construct
  misc_feature 1..72: note = Synthetic: 855_Human_diMut_GG49TA_n1
  source 1..72: mol_type = other DNA
gggggaggctgctggtgaatattaaccaaggtcaccccagttatcggataagcaaacaggggctaagtccac

SEQ ID NO: 398 - DNA, 72 bp, synthetic construct
  misc_feature 1..72: note = Synthetic: 856_Human_diMut_GG49TC_n1
  source 1..72: mol_type = other DNA
gggggaggctgctggtgaatattaaccaaggtcaccccagttatcggatcagcaaacaggggctaagtccac

SEQ ID NO: 399 - DNA, 72 bp, synthetic construct
  misc_feature 1..72: note = Synthetic: 857_Human_diMut_GG49TT_n1
  source 1..72: mol_type = other DNA
gggggaggctgctggtgaatattaaccaaggtcaccccagttatcggattagcaaacaggggctaagtccac

SEQ ID NO: 400 - DNA, 72 bp, synthetic construct
  misc_feature 1..72: note = Synthetic: 859_Human_diMut_GA50AG_n1
  source 1..72: mol_type = other DNA
gggggaggctgctggtgaatattaaccaaggtcaccccagttatcggagaggcaaacaggggctaagtccac

SEQ ID NO: 401 - DNA, 72 bp, synthetic construct
  misc_feature 1..72: note = Synthetic: 866_Human_diMut_GA50TT_n1
  source 1..72: mol_type = other DNA
gggggaggctgctggtgaatattaaccaaggtcaccccagttatcggagttgcaaacaggggctaagtccac

SEQ ID NO: 402 - DNA, 72 bp, synthetic construct
  misc_feature 1..72: note = Synthetic: 867_Human_diMut_AG51CA_n1
  source 1..72: mol_type = other DNA
gggggaggctgctggtgaatattaaccaaggtcaccccagttatcggaggcacaaacaggggctaagtccac

SEQ ID NO: 403 - DNA, 72 bp, synthetic construct
  misc_feature 1..72: note = Synthetic: 868_Human_diMut_AG51CC_n1
  source 1..72: mol_type = other DNA
gggggaggctgctggtgaatattaaccaaggtcaccccagttatcggaggcccaaacaggggctaagtccac

SEQ ID NO: 404 - DNA, 72 bp, synthetic construct
  misc_feature 1..72: note = Synthetic: 876_Human_diMut_GC52AA_n1
  source 1..72: mol_type = other DNA
gggggaggctgctggtgaatattaaccaaggtcaccccagttatcggaggaaaaaacaggggctaagtccac

SEQ ID NO: 405 - DNA, 72 bp, synthetic construct
  misc_feature 1..72: note = Synthetic: 881_Human_diMut_GC52CT_n1
  source 1..72: mol_type = other DNA
gggggaggctgctggtgaatattaaccaaggtcaccccagttatcggaggactaaacaggggctaagtccac

SEQ ID NO: 406 - DNA, 72 bp, synthetic construct
  misc_feature 1..72: note = Synthetic: 885_Human_diMut_CA53AC_n1
  source 1..72: mol_type = other DNA
gggggaggctgctggtgaatattaaccaaggtcaccccagttatcggaggagacaacaggggctaagtccac

SEQ ID NO: 407 - DNA, 72 bp, synthetic construct
  misc_feature 1..72: note = Synthetic: 886_Human_diMut_CA53AG_n1
  source 1..72: mol_type = other DNA
gggggaggctgctggtgaatattaaccaaggtcaccccagttatcggaggagagaacaggggctaagtccac

SEQ ID NO: 408 - DNA, 72 bp, synthetic construct
  misc_feature 1..72: note = Synthetic: 887_Human_diMut_CA53AT_n1
  source 1..72: mol_type = other DNA
gggggaggctgctggtgaatattaaccaaggtcaccccagttatcggaggagataacaggggctaagtccac

SEQ ID NO: 409 - DNA, 72 bp, synthetic construct
  misc_feature 1..72: note = Synthetic: 891_Human_diMut_CA53TC_n1
  source 1..72: mol_type = other DNA
gggggaggctgctggtgaatattaaccaaggtcaccccagttatcggaggagtcaacaggggctaagtccac

SEQ ID NO: 410 - DNA, 72 bp, synthetic construct
  misc_feature 1..72: note = Synthetic: 892_Human_diMut_CA53TG_n1
  source 1..72: mol_type = other DNA
gggggaggctgctggtgaatattaaccaaggtcaccccagttatcggaggagtgaacaggggctaagtccac

SEQ ID NO: 411 - DNA, 72 bp, synthetic construct
  misc_feature 1..72: note = Synthetic: 898_Human_diMut_AA54GG_n1
  source 1..72: mol_type = other DNA
gggggaggctgctggtgaatattaaccaaggtcaccccagttatcggaggagcggacaggggctaagtccac

SEQ ID NO: 412 - DNA, 72 bp, synthetic construct
  misc_feature 1..72: note = Synthetic: 900_Human_diMut_AA54TC_n1
  source 1..72: mol_type = other DNA
gggggaggctgctggtgaatattaaccaaggtcaccccagttatcggaggagctcacaggggctaagtccac

SEQ ID NO: 413 - DNA, 72 bp, synthetic construct
  misc_feature 1..72: note = Synthetic: 906_Human_diMut_AA55GC_n1
  source 1..72: mol_type = other DNA
gggggaggctgctggtgaatattaaccaaggtcaccccagttatcggaggagcagccaggggctaagtccac

SEQ ID NO: 414 - DNA, 72 bp, synthetic construct
  misc_feature 1..72: note = Synthetic: 933_Human_diMut_AG58GA_n1
  source 1..72: mol_type = other DNA
gggggaggctgctggtgaatattaaccaaggtcaccccagttatcggaggagcaaacgagggctaagtccac

SEQ ID NO: 415 - DNA, 72 bp, synthetic construct
  misc_feature 1..72: note = Synthetic: 941_Human_diMut_GG59AT_n1
  source 1..72: mol_type = other DNA
gggggaggctgctggtgaatattaaccaaggtcaccccagttatcggaggagcaaacaatggctaagtccac

SEQ ID NO: 416 - DNA, 72 bp, synthetic construct
  misc_feature 1..72: note = Synthetic: 943_Human_diMut_GG59CC_n1
  source 1..72: mol_type = other DNA
gggggaggctgctggtgaatattaaccaaggtcaccccagttatcggaggagcaaacaccggctaagtccac

SEQ ID NO: 417 - DNA, 72 bp, synthetic construct
  misc_feature 1..72: note = Synthetic: 947_Human_diMut_GG59TT_n1
  source 1..72: mol_type = other DNA
gggggaggctgctggtgaatattaaccaaggtcaccccagttatcggaggagcaaacattggctaagtccac

SEQ ID NO: 418 - DNA, 72 bp, synthetic construct
  misc_feature 1..72: note = Synthetic: 950_Human_diMut_GG60AT_n1
  source 1..72: mol_type = other DNA
gggggaggctgctggtgaatattaaccaaggtcaccccagttatcggaggagcaaacagatgctaagtccac

SEQ ID NO: 419 - DNA, 72 bp, synthetic construct
  misc_feature 1..72: note = Synthetic: 955_Human_diMut_GG60TC_n1
  source 1..72: mol_type = other DNA
gggggaggctgctggtgaatattaaccaaggtcaccccagttatcggaggagcaaacagtcgctaagtccac

SEQ ID NO: 420 - DNA, 72 bp, synthetic construct
  misc_feature 1..72: note = Synthetic: 957_Human_diMut_GG61AA_n1
  source 1..72: mol_type = other DNA
gggggaggctgctggtgaatattaaccaaggtcaccccagttatcggaggagcaaacaggaactaagtccac

SEQ ID NO: 421 - DNA, 72 bp, synthetic construct
  misc_feature 1..72: note = Synthetic: 958_Human_diMut_GG61AC_n1
  source 1..72: mol_type = other DNA
gggggaggctgctggtgaatattaaccaaggtcaccccagttatcggaggagcaaacaggacctaagtccac

SEQ ID NO: 422 - DNA, 72 bp, synthetic construct
  misc_feature 1..72: note = Synthetic: 960_Human_diMut_GG61CA_n1
  source 1..72: mol_type = other DNA
gggggaggctgctggtgaatattaaccaaggtcaccccagttatcggaggagcaaacaggcactaagtccac

SEQ ID NO: 423 - DNA, 72 bp, synthetic construct
  misc_feature 1..72: note = Synthetic: 964_Human_diMut_GG61TC_n1
  source 1..72: mol_type = other DNA
gggggaggctgctggtgaatattaaccaaggtcaccccagttatcggaggagcaaacaggtcctaagtccac

SEQ ID NO: 424 - DNA, 72 bp, synthetic construct
  misc_feature 1..72: note = Synthetic: 965_Human_diMut_GG61TT_n1
  source 1..72: mol_type = other DNA
gggggaggctgctggtgaatattaaccaaggtcaccccagttatcggaggagcaaacaggttctaagtccac

SEQ ID NO: 425 - DNA, 72 bp, synthetic construct
  misc_feature 1..72: note = Synthetic: 968_Human_diMut_GC62AT_n1
  source 1..72: mol_type = other DNA
gggggaggctgctggtgaatattaaccaaggtcaccccagttatcggaggagcaaacagggattaagtccac

SEQ ID NO: 426 - DNA, 72 bp, synthetic construct
  misc_feature 1..72: note = Synthetic: 969_Human_diMut_GC62CA_n1
  source 1..72: mol_type = other DNA
gggggaggctgctggtgaatattaaccaaggtcaccccagttatcggaggagcaaacagggcataagtccac

SEQ ID NO: 427 - DNA, 72 bp, synthetic construct
  misc_feature 1..72: note = Synthetic: 980_Human_diMut_CT63GG_n1
  source 1..72: mol_type = other DNA
gggggaggctgctggtgaatattaaccaaggtcaccccagttatcggaggagcaaacaggggggaagtccac

SEQ ID NO: 428 - DNA, 72 bp, synthetic construct
  misc_feature 1..72: note = Synthetic: 981_Human_diMut_CT63TA_n1
  source 1..72: mol_type = other DNA
gggggaggctgctggtgaatattaaccaaggtcaccccagttatcggaggagcaaacaggggtaaagtccac

SEQ ID NO: 429 - DNA, 72 bp, synthetic construct
  misc_feature 1..72: note = Synthetic: 983_Human_diMut_CT63TG_n1
  source 1..72: mol_type = other DNA
gggggaggctgctggtgaatattaaccaaggtcaccccagttatcggaggagcaaacaggggtgaagtccac

SEQ ID NO: 430 - DNA, 72 bp, synthetic construct
  misc_feature 1..72: note = Synthetic: 985_Human_diMut_TA64AG_n1
  source 1..72: mol_type = other DNA
gggggaggctgctggtgaatattaaccaaggtcaccccagttatcggaggagcaaacaggggcagagtccac

SEQ ID NO: 431 - DNA, 72 bp, synthetic construct
  misc_feature 1..72: note = Synthetic: 986_Human_diMut_TA64AT_n1
  source 1..72: mol_type = other DNA
gggggaggctgctggtgaatattaaccaaggtcaccccagttatcggaggagcaaacaggggcatagtccac

SEQ ID NO: 432 - DNA, 72 bp, synthetic construct
  misc_feature 1..72: note = Synthetic: 994_Human_diMut_AA65CG_n1
  source 1..72: mol_type = other DNA
gggggaggctgctggtgaatattaaccaaggtcaccccagttatcggaggagcaaacaggggctcggtccac

SEQ ID NO: 433 - DNA, 72 bp, synthetic construct
  misc_feature 1..72: note = Synthetic: 1022_Human_diMut_TC68AT_n1
  source 1..72: mol_type = other DNA
gggggaggctgctggtgaatattaaccaaggtcaccccagttatcggaggagcaaacaggggctaagatcac

SEQ ID NO: 434 - DNA, 72 bp, synthetic construct
  misc_feature 1..72: note = Synthetic: 1023_Human_diMut_TC68CA_n1
  source 1..72: mol_type = other DNA
gggggaggctgctggtgaatattaaccaaggtcaccccagttatcggaggagcaaacaggggctaagcacac

SEQ ID NO: 435 - DNA, 72 bp, synthetic construct
  misc_feature 1..72: note = Synthetic: 1028_Human_diMut_TC68GT_n1
  source 1..72: mol_type = other DNA
gggggaggctgctggtgaatattaaccaaggtcaccccagttatcggaggagcaaacaggggctaaggtcac

SEQ ID NO: 436 - DNA, 72 bp, synthetic construct
  misc_feature 1..72: note = Synthetic: 1029_Human_diMut_CC69AA_n1
  source 1..72: mol_type = other DNA
gggggaggctgctggtgaatattaaccaaggtcaccccagttatcggaggagcaaacaggggctaagtaaac

SEQ ID NO: 437 - DNA, 72 bp, synthetic construct
  misc_feature 1..72: note = Synthetic: 4267_Human_quadMut_1T_3A_8T_48T_n1
  source 1..72: mol_type = other DNA
tgaggagtctgctggtgaatattaaccaaggtcaccccagttatcggtggagcaaacaggggctaagtccac

SEQ ID NO: 438 - DNA, 72 bp, synthetic construct
  misc_feature 1..72: note = Synthetic: 4268_Human_quadMut_1T_3A_8C_52T_n1
  source 1..72: mol_type = other DNA
tgaggagcctgctggtgaatattaaccaaggtcaccccagttatcggaggatcaaacaggggctaagtccac

SEQ ID NO: 439 - DNA, 72 bp, synthetic construct
  misc_feature 1..72: note = Synthetic: 4269_Human_quadMut_1A_3A_8A_62C_n1
  source 1..72: mol_type = other DNA
agaggagactgctggtgaatattaaccaaggtcaccccagttatcggaggagcaaacagggcctaagtccac

SEQ ID NO: 440 - DNA, 72 bp, synthetic construct
  misc_feature 1..72: note = Synthetic: 4272_Human_quadMut_1A_3T_14A_37T_n1
  source 1..72: mol_type = other DNA
agtggaggctgctagtgaatattaaccaaggtcacctcagttatcggaggagcaaacaggggctaagtccac

SEQ ID NO: 441 - DNA, 72 bp, synthetic construct
  misc_feature 1..72: note = Synthetic: 4282_Human_quadMut_1T_3A_35A_48G_n1
  source 1..72: mol_type = other DNA
tgaggaggctgctggtgaatattaaccaaggtcaacccagttatcgggggagcaaacaggggctaagtccac

SEQ ID NO: 442 - DNA, 72 bp, synthetic construct
  misc_feature 1..72: note = Synthetic: 4284_Human_quadMut_1A_3T_35T_62A_n1
  source 1..72: mol_type = other DNA
agtggaggctgctggtgaatattaaccaaggtcatcccagttatcggaggagcaaacagggactaagtccac

SEQ ID NO: 443 - DNA, 72 bp, synthetic construct
  misc_feature 1..72: note = Synthetic: 4287_Human_quadMut_1A_3T_37A_46T_n1
  source 1..72: mol_type = other DNA
agtggaggctgctggtgaatattaaccaaggtcaccacagttatctgaggagcaaacaggggctaagtccac

SEQ ID NO: 444 - DNA, 72 bp, synthetic construct
  misc_feature 1..72: note = Synthetic: 4288_Human_quadMut_1A_3T_37T_48T_n1
  source 1..72: mol_type = other DNA
agtggaggctgctggtgaatattaaccaaggtcacctcagttatcggtggagcaaacaggggctaagtccac

SEQ ID NO: 445 - DNA, 72 bp, synthetic construct
  misc_feature 1..72: note = Synthetic: 4289_Human_quadMut_1A_3A_37T_52T_n1
  source 1..72: mol_type = other DNA
agaggaggctgctggtgaatattaaccaaggtcacctcagttatcggaggatcaaacaggggctaagtccac

SEQ ID NO: 446 - DNA, 72 bp, synthetic construct
  misc_feature 1..72: note = Synthetic: 4293_Human_quadMut_1A_3A_45T_48T_n1
  source 1..72: mol_type = other DNA
agaggaggctgctggtgaatattaaccaaggtcaccccagttattggtggagcaaacaggggctaagtccac

SEQ ID NO: 447 - DNA, 72 bp, synthetic construct
  misc_feature 1..72: note = Synthetic: 4298_Human_quadMut_1T_3T_46T_52T_n1
  source 1..72: mol_type = other DNA
tgtggaggctgctggtgaatattaaccaaggtcaccccagttatctgaggatcaaacaggggctaagtccac

SEQ ID NO: 448 - DNA, 72 bp, synthetic construct
  misc_feature 1..72: note = Synthetic: 4299_Human_quadMut_1T_3T_46T_62A_n1
  source 1..72: mol_type = other DNA
tgtggaggctgctggtgaatattaaccaaggtcaccccagttatctgaggagcaaacagggactaagtccac

SEQ ID NO: 449 - DNA, 72 bp, synthetic construct
  misc_feature 1..72: note = Synthetic: 4310_Human_quadMut_1T_8T_14T_46T_n1
  source 1..72: mol_type = other DNA
tggggagtctgcttgtgaatattaaccaaggtcaccccagttatctgaggagcaaacaggggctaagtccac

SEQ ID NO: 450 - DNA, 72 bp, synthetic construct
  misc_feature 1..72: note = Synthetic: 4312_Human_quadMut_1T_8C_14T_52T_n1
  source 1..72: mol_type = other DNA
tggggagcctgcttgtgaatattaaccaaggtcaccccagttatcggaggatcaaacaggggctaagtccac

SEQ ID NO: 451 - DNA, 72 bp, synthetic construct
  misc_feature 1..72: note = Synthetic: 4313_Human_quadMut_1A_8T_14T_62T_n1
  source 1..72: mol_type = other DNA
aggggagtctgcttgtgaatattaaccaaggtcaccccagttatcggaggagcaaacagggtctaagtccac

SEQ ID NO: 452 - DNA, 72 bp, synthetic construct
  misc_feature 1..72: note = Synthetic: 4314_Human_quadMut_1A_8C_14A_72A_n1
  source 1..72: mol_type = other DNA
aggggagcctgctagtgaatattaaccaaggtcaccccagttatcggaggagcaaacaggggctaagtccaa

SEQ ID NO: 453 - DNA, 72 bp, synthetic construct
  misc_feature 1..72: note = Synthetic: 4315_Human_quadMut_1A_8C_35T_37A_n1
  source 1..72: mol_type = other DNA
aggggagcctgctggtgaatattaaccaaggtcatcacagttatcggaggagcaaacaggggctaagtccac

SEQ ID NO: 454 - DNA, 72 bp, synthetic construct
  misc_feature 1..72: note = Synthetic: 4317_Human_quadMut_1A_8A_35T_46A_n1
  source 1..72: mol_type = other DNA
aggggagactgctggtgaatattaaccaaggtcatcccagttatcagaggagcaaacaggggctaagtccac

SEQ ID NO: 455 - DNA, 72 bp, synthetic construct
  misc_feature 1..72: note = Synthetic: 4318_Human_quadMut_1T_8C_35G_48G_n1
  source 1..72: mol_type = other DNA
tggggagcctgctggtgaatattaaccaaggtcagcccagttatcgggggagcaaacaggggctaagtccac

SEQ ID NO: 456 - DNA, 72 bp, synthetic construct
  misc_feature 1..72: note = Synthetic: 4320_Human_quadMut_1T_8A_35A_62C_n1
  source 1..72: mol_type = other DNA
tggggagactgctggtgaatattaaccaaggtcaacccagttatcggaggagcaaacagggcctaagtccac

SEQ ID NO: 457 - DNA, 72 bp, synthetic construct
  misc_feature 1..72: note = Synthetic: 4323_Human_quadMut_1A_8A_37A_46A_n1
  source 1..72: mol_type = other DNA
aggggagactgctggtgaatattaaccaaggtcaccacagttatcagaggagcaaacaggggctaagtccac

SEQ ID NO: 458 - DNA, 72 bp, synthetic construct
  misc_feature 1..72: note = Synthetic: 4325_Human_quadMut_1T_8C_37T_52A_n1
  source 1..72: mol_type = other DNA
tggggagcctgctggtgaatattaaccaaggtcacctcagttatcggaggaacaaacaggggctaagtccac

SEQ ID NO: 459 - DNA, 72 bp, synthetic construct
  misc_feature 1..72: note = Synthetic: 4340_Human_quadMut_1A_8T_52T_62T_n1
  source 1..72: mol_type = other DNA
aggggagtctgctggtgaatattaaccaaggtcaccccagttatcggaggatcaaacagggtctaagtccac

SEQ ID NO: 460 - DNA, 72 bp, synthetic construct
  misc_feature 1..72: note = Synthetic: 4345_Human_quadMut_1T_14A_35G_46T_n1
  source 1..72: mol_type = other DNA
tggggaggctgctagtgaatattaaccaaggtcagcccagttatctgaggagcaaacaggggctaagtccac

SEQ ID NO: 461 - DNA, 72 bp, synthetic construct
  misc_feature 1..72: note = Synthetic: 4353_Human_quadMut_1T_14T_37A_52T_n1
  source 1..72: mol_type = other DNA
tggggaggctgcttgtgaatattaaccaaggtcaccacagttatcggaggatcaaacaggggctaagtccac

SEQ ID NO: 462 - DNA, 72 bp, synthetic construct
  misc_feature 1..72: note = Synthetic: 4371_Human_quadMut_1A_35T_37A_45T_n1
  source 1..72: mol_type = other DNA
aggggaggctgctggtgaatattaaccaaggtcatcacagttattggaggagcaaacaggggctaagtccac

SEQ ID NO: 463 - DNA, 72 bp, synthetic construct
  misc_feature 1..72: note = Synthetic: 4374_Human_quadMut_1A_35A_37A_52T_n1
  source 1..72: mol_type = other DNA
aggggaggctgctggtgaatattaaccaaggtcaacacagttatcggaggatcaaacaggggctaagtccac

SEQ ID NO: 464 - DNA, 72 bp, synthetic construct
  misc_feature 1..72: note = Synthetic: 4376_Human_quadMut_1A_35A_37A_72T_n1
  source 1..72: mol_type = other DNA
aggggaggctgctggtgaatattaaccaaggtcaacacagttatcggaggagcaaacaggggctaagtccat

SEQ ID NO: 465 - DNA, 72 bp, synthetic construct
  misc_feature 1..72: note = Synthetic: 4377_Human_quadMut_1T_35G_45T_46T_n1
  source 1..72: mol_type = other DNA
tggggaggctgctggtgaatattaaccaaggtcagcccagttatttgaggagcaaacaggggctaagtccac

SEQ ID NO: 466 - DNA, 72 bp, synthetic construct
  misc_feature 1..72: note = Synthetic: 4378_Human_quadMut_1T_35G_45T_48T_n1
  source 1..72: mol_type = other DNA
tggggaggctgctggtgaatattaaccaaggtcagcccagttattggtggagcaaacaggggctaagtccac

SEQ ID NO: 467 - DNA, 72 bp, synthetic construct
  misc_feature 1..72: note = Synthetic: 4379_Human_quadMut_1A_35G_45T_52C_n1
  source 1..72: mol_type = other DNA
aggggaggctgctggtgaatattaaccaaggtcagcccagttattggaggaccaaacaggggctaagtccac

SEQ ID NO: 468 - DNA, 72 bp, synthetic construct
  misc_feature 1..72: note = Synthetic: 4381_Human_quadMut_1A_35T_45T_72A_n1
  source 1..72: mol_type = other DNA
aggggaggctgctggtgaatattaaccaaggtcatcccagttattggaggagcaaacaggggctaagtccaa

SEQ ID NO: 469 - DNA, 72 bp, synthetic construct
  misc_feature 1..72: note = Synthetic: 4382_Human_quadMut_1A_35G_46A_48G_n1
  source 1..72: mol_type = other DNA
aggggaggctgctggtgaatattaaccaaggtcagcccagttatcaggggagcaaacaggggctaagtccac

SEQ ID NO: 470 - DNA, 72 bp, synthetic construct
  misc_feature 1..72: note = Synthetic: 4383_Human_quadMut_1A_35A_46T_52A_n1
  source 1..72: mol_type = other DNA
aggggaggctgctggtgaatattaaccaaggtcaacccagttatctgaggaacaaacaggggctaagtccac

SEQ ID NO: 471 - DNA, 72 bp, synthetic construct
  misc_feature 1..72: note = Synthetic: 4384_Human_quadMut_1A_35T_46T_62C_n1
  source 1..72: mol_type = other DNA
aggggaggctgctggtgaatattaaccaaggtcatcccagttatctgaggagcaaacagggcctaagtccac

SEQ ID NO: 472 - DNA, 72 bp, synthetic construct
  misc_feature 1..72: note = Synthetic: 4387_Human_quadMut_1T_35T_48G_62T_n1
  source 1..72: mol_type = other DNA
tggggaggctgctggtgaatattaaccaaggtcatcccagttatcgggggagcaaacagggtctaagtccac

SEQ ID NO: 473 - DNA, 72 bp, synthetic construct
  misc_feature 1..72: note = Synthetic: 4388_Human_quadMut_1A_35T_48G_72A_n1
  source 1..72: mol_type = other DNA
aggggaggctgctggtgaatattaaccaaggtcatcccagttatcgggggagcaaacaggggctaagtccaa

SEQ ID NO: 474 - DNA, 72 bp, synthetic construct
  misc_feature 1..72: note = Synthetic: 4394_Human_quadMut_1A_37A_45G_52T_n1
  source 1..72: mol_type = other DNA
aggggaggctgctggtgaatattaaccaaggtcaccacagttatgggaggatcaaacaggggctaagtccac

SEQ ID NO: 475 - DNA, 72 bp, synthetic construct
  misc_feature 1..72: note = Synthetic: 4395_Human_quadMut_1T_37T_45G_62A_n1
  source 1..72: mol_type = other DNA
tggggaggctgctggtgaatattaaccaaggtcacctcagttatgggaggagcaaacagggactaagtccac

SEQ ID NO: 476 - DNA, 72 bp, synthetic construct
  misc_feature 1..72: note = Synthetic: 4396_Human_quadMut_1A_37T_45G_72A_n1
  source 1..72: mol_type = other DNA
aggggaggctgctggtgaatattaaccaaggtcacctcagttatgggaggagcaaacaggggctaagtccaa

SEQ ID NO: 477 - DNA, 72 bp, synthetic construct
  misc_feature 1..72: note = Synthetic: 4398_Human_quadMut_1T_37A_46A_52C_n1
  source 1..72: mol_type = other DNA
tggggaggctgctggtgaatattaaccaaggtcaccacagttatcagaggaccaaacaggggctaagtccac

SEQ ID NO: 478 - DNA, 72 bp, synthetic construct
  misc_feature 1..72: note = Synthetic: 4401_Human_quadMut_1A_37A_48G_52C_n1
  source 1..72: mol_type = other DNA
aggggaggctgctggtgaatattaaccaaggtcaccacagttatcgggggaccaaacaggggctaagtccac

SEQ ID NO: 479 - DNA, 72 bp, synthetic construct
  misc_feature 1..72: note = Synthetic: 4402_Human_quadMut_1T_37T_48G_62T_n1
  source 1..72: mol_type = other DNA
tggggaggctgctggtgaatattaaccaaggtcacctcagttatcgggggagcaaacagggtctaagtccac

SEQ ID NO: 480 - DNA, 72 bp, synthetic construct
  misc_feature 1..72: note = Synthetic: 4405_Human_quadMut_1A_37A_52A_72T_n1
  source 1..72: mol_type = other DNA
aggggaggctgctggtgaatattaaccaaggtcaccacagttatcggaggaacaaacaggggctaagtccat

SEQ ID NO: 481 - DNA, 72 bp, synthetic construct
  misc_feature 1..72: note = Synthetic: 4407_Human_quadMut_1T_45G_46T_48G_n1
  source 1..72: mol_type = other DNA
tggggaggctgctggtgaatattaaccaaggtcaccccagttatgtggggagcaaacaggggctaagtccac

SEQ ID NO: 482 - DNA, 72 bp, synthetic construct
  misc_feature 1..72: note = Synthetic: 4410_Human_quadMut_1T_45G_46A_72A_n1
  source 1..72: mol_type = other DNA
tggggaggctgctggtgaatattaaccaaggtcaccccagttatgagaggagcaaacaggggctaagtccaa

SEQ ID NO: 483 - DNA, 72 bp, synthetic construct
  misc_feature 1..72: note = Synthetic: 4416_Human_quadMut_1T_45T_62C_72A_n1
  source 1..72: mol_type = other DNA
tggggaggctgctggtgaatattaaccaaggtcaccccagttattggaggagcaaacagggcctaagtccaa

SEQ ID NO: 484 - DNA, 72 bp, synthetic construct
  misc_feature 1..72: note = Synthetic: 4417_Human_quadMut_1T_46A_48T_52C_n1
  source 1..72: mol_type = other DNA
tggggaggctgctggtgaatattaaccaaggtcaccccagttatcagtggaccaaacaggggctaagtccac

SEQ ID NO: 485 - DNA, 72 bp, synthetic construct
  misc_feature 1..72: note = Synthetic: 4418_Human_quadMut_1T_46A_48T_62A_n1
  source 1..72: mol_type = other DNA
tggggaggctgctggtgaatattaaccaaggtcaccccagttatcagtggagcaaacagggactaagtccac

SEQ ID NO: 486 - DNA, 72 bp, synthetic construct
  misc_feature 1..72: note = Synthetic: 4419_Human_quadMut_1T_46A_48T_72A_n1
  source 1..72: mol_type = other DNA
tggggaggctgctggtgaatattaaccaaggtcaccccagttatcagtggagcaaacaggggctaagtccaa

SEQ ID NO: 487 - DNA, 72 bp, synthetic construct
  misc_feature 1..72: note = Synthetic: 4423_Human_quadMut_1T_48G_52A_62T_n1
  source 1..72: mol_type = other DNA
tggggaggctgctggtgaatattaaccaaggtcaccccagttatcgggggaacaaacagggtctaagtccac

SEQ ID NO: 488 - DNA, 72 bp, synthetic construct
  misc_feature 1..72: note = Synthetic: 4426_Human_quadMut_1T_52T_62C_72A_n1
  source 1..72: mol_type = other DNA
tggggaggctgctggtgaatattaaccaaggtcaccccagttatcggaggatcaaacagggcctaagtccaa

SEQ ID NO: 489 - DNA, 72 bp, synthetic construct
  misc_feature 1..72: note = Synthetic: 4435_Human_quadMut_3A_8A_35G_37T_n1
  source 1..72: mol_type = other DNA
ggaggagactgctggtgaatattaaccaaggtcagctcagttatcggaggagcaaacaggggctaagtccac

SEQ ID NO: 490 - DNA, 72 bp, synthetic construct
  misc_feature 1..72: note = Synthetic: 4439_Human_quadMut_3A_8T_35T_52T_n1
  source 1..72: mol_type = other DNA
ggaggagtctgctggtgaatattaaccaaggtcatcccagttatcggaggatcaaacaggggctaagtccac

SEQ ID NO: 491 - DNA, 72 bp, synthetic construct
  misc_feature 1..72: note = Synthetic: 4445_Human_quadMut_3A_8A_37A_52A_n1
  source 1..72: mol_type = other DNA
ggaggagactgctggtgaatattaaccaaggtcaccacagttatcggaggaacaaacaggggctaagtccac

SEQ ID NO: 492 - DNA, 72 bp, synthetic construct
  misc_feature 1..72: note = Synthetic: 4448_Human_quadMut_3A_8A_45T_46A_n1
  source 1..72: mol_type = other DNA
ggaggagactgctggtgaatattaaccaaggtcaccccagttattagaggagcaaacaggggctaagtccac

SEQ ID NO: 493 - DNA, 72 bp, synthetic construct
  misc_feature 1..72: note = Synthetic: 4453_Human_quadMut_3T_8C_46T_48G_n1
  source 1..72: mol_type = other DNA
ggtggagcctgctggtgaatattaaccaaggtcaccccagttatctggggagcaaacaggggctaagtccac

SEQ ID NO: 494 - DNA, 72 bp, synthetic construct
  misc_feature 1..72: note = Synthetic: 4455_Human_quadMut_3A_8C_46A_62T_n1
  source 1..72: mol_type = other DNA
ggaggagcctgctggtgaatattaaccaaggtcaccccagttatcagaggagcaaacagggtctaagtccac

SEQ ID NO: 495 - DNA, 72 bp, synthetic construct
  misc_feature 1..72: note = Synthetic: 4456_Human_quadMut_3T_8T_46A_72A_n1
  source 1..72: mol_type = other DNA
ggtggagtctgctggtgaatattaaccaaggtcaccccagttatcagaggagcaaacaggggctaagtccaa

SEQ ID NO: 496 - DNA, 72 bp, synthetic construct
  misc_feature 1..72: note = Synthetic: 4457_Human_quadMut_3T_8A_48G_52A_n1
  source 1..72: mol_type = other DNA
ggtggagactgctggtgaatattaaccaaggtcaccccagttatcgggggaacaaacaggggctaagtccac

SEQ ID NO: 497 - DNA, 72 bp, synthetic construct
  misc_feature 1..72: note = Synthetic: 4460_Human_quadMut_3T_8A_52C_62T_n1
  source 1..72: mol_type = other DNA
ggtggagactgctggtgaatattaaccaaggtcaccccagttatcggaggaccaaacagggtctaagtccac

SEQ ID NO: 498 - DNA, 72 bp, synthetic construct
  misc_feature 1..72: note = Synthetic: 4462_Human_quadMut_3T_8T_62T_72T_n1
  source 1..72: mol_type = other DNA
ggtggagtctgctggtgaatattaaccaaggtcaccccagttatcggaggagcaaacagggtctaagtccat

SEQ ID NO: 499 - DNA, 72 bp, synthetic construct
  misc_feature 1..72: note = Synthetic: 4467_Human_quadMut_3T_14T_35G_52T_n1
  source 1..72: mol_type = other DNA
ggtggaggctgcttgtgaatattaaccaaggtcagcccagttatcggaggatcaaacaggggctaagtccac

SEQ ID NO: 500 - DNA, 72 bp, synthetic construct
  misc_feature 1..72: note = Synthetic: 4471_Human_quadMut_3T_14A_37A_46A_n1
  source 1..72: mol_type = other DNA
ggtggaggctgctagtgaatattaaccaaggtcaccacagttatcagaggagcaaacaggggctaagtccac

SEQ ID NO: 501 - DNA, 72 bp, synthetic construct
  misc_feature 1..72: note = Synthetic: 4481_Human_quadMut_3A_14T_46T_48T_n1
  source 1..72: mol_type = other DNA
ggaggaggctgcttgtgaatattaaccaaggtcaccccagttatctgtggagcaaacaggggctaagtccac

SEQ ID NO: 502 - DNA, 72 bp, synthetic construct
  misc_feature 1..72: note = Synthetic: 4482_Human_quadMut_3A_14T_46T_52C_n1
  source 1..72: mol_type = other DNA
ggaggaggctgcttgtgaatattaaccaaggtcaccccagttatctgaggaccaaacaggggctaagtccac

SEQ ID NO: 503 - DNA, 72 bp, synthetic construct
  misc_feature 1..72: note = Synthetic: 4487_Human_quadMut_3T_14T_48G_72A_n1
  source 1..72: mol_type = other DNA
ggtggaggctgcttgtgaatattaaccaaggtcaccccagttatcgggggagcaaacaggggctaagtccaa

SEQ ID NO: 504 - DNA, 72 bp, synthetic construct
  misc_feature 1..72: note = Synthetic: 4488_Human_quadMut_3A_14A_52C_62T_n1
  source 1..72: mol_type = other DNA
ggaggaggctgctagtgaatattaaccaaggtcaccccagttatcggaggaccaaacagggtctaagtccac

SEQ ID NO: 505 - DNA, 72 bp, synthetic construct
  misc_feature 1..72: note = Synthetic: 4492_Human_quadMut_3A_35T_37T_46T_n1
  source 1..72: mol_type = other DNA
ggaggaggctgctggtgaatattaaccaaggtcatctcagttatctgaggagcaaacaggggctaagtccac

SEQ ID NO: 506 - DNA, 72 bp, synthetic construct
  misc_feature 1..72: note = Synthetic: 4493_Human_quadMut_3T_35T_37T_48G_n1
  source 1..72: mol_type = other DNA
ggtggaggctgctggtgaatattaaccaaggtcatctcagttatcgggggagcaaacaggggctaagtccac

SEQ ID NO: 507 - DNA, 72 bp, synthetic construct
  misc_feature 1..72: note = Synthetic: 4494_Human_quadMut_3T_35A_37T_52C_n1
  source 1..72: mol_type = other DNA
ggtggaggctgctggtgaatattaaccaaggtcaactcagttatcggaggaccaaacaggggctaagtccac

SEQ ID NO: 508 - DNA, 72 bp, synthetic construct
  misc_feature 1..72: note = Synthetic: 4499_Human_quadMut_3T_35T_45T_52A_n1
  source 1..72: mol_type = other DNA
ggtggaggctgctggtgaatattaaccaaggtcatcccagttattggaggaacaaacaggggctaagtccac

SEQ ID NO: 509 - DNA, 72 bp, synthetic construct
  misc_feature 1..72: note = Synthetic: 4502_Human_quadMut_3A_35G_46A_48G_n1
  source 1..72: mol_type = other DNA
ggaggaggctgctggtgaatattaaccaaggtcagcccagttatcaggggagcaaacaggggctaagtccac

SEQ ID NO: 510 - DNA, 72 bp, synthetic construct
  misc_feature 1..72: note = Synthetic: 4503_Human_quadMut_3T_35T_46T_52A_n1
  source 1..72: mol_type = other DNA
ggtggaggctgctggtgaatattaaccaaggtcatcccagttatctgaggaacaaacaggggctaagtccac

SEQ ID NO: 511 - DNA, 72 bp, synthetic construct
  misc_feature 1..72: note = Synthetic: 4506_Human_quadMut_3T_35G_48T_52T_n1
  source 1..72: mol_type = other DNA
ggtggaggctgctggtgaatattaaccaaggtcagcccagttatcggtggatcaaacaggggctaagtccac

SEQ ID NO: 512 - DNA, 72 bp, synthetic construct
  misc_feature 1..72: note = Synthetic: 4507_Human_quadMut_3A_35A_48T_62T_n1
  source 1..72: mol_type = other DNA
ggaggaggctgctggtgaatattaaccaaggtcaacccagttatcggtggagcaaacagggtctaagtccac

SEQ ID NO: 513 - DNA, 72 bp, synthetic construct
  misc_feature 1..72: note = Synthetic: 4509_Human_quadMut_3T_35T_52A_62T_n1
  source 1..72: mol_type = other DNA
ggtggaggctgctggtgaatattaaccaaggtcatcccagttatcggaggaacaaacagggtctaagtccac

SEQ ID NO: 514 - DNA, 72 bp, synthetic construct
  misc_feature 1..72: note = Synthetic: 4513_Human_quadMut_3A_37A_45T_48T_n1
  source 1..72: mol_type = other DNA
ggaggaggctgctggtgaatattaaccaaggtcaccacagttattggtggagcaaacaggggctaagtccac

SEQ ID NO: 515 - DNA, 72 bp, synthetic construct
  misc_feature 1..72: note = Synthetic: 4519_Human_quadMut_3T_37T_46A_62A_n1
  source 1..72: mol_type = other DNA
ggtggaggctgctggtgaatattaaccaaggtcacctcagttatcagaggagcaaacagggactaagtccac

SEQ ID NO: 516 - DNA, 72 bp, synthetic construct
  misc_feature 1..72: note = Synthetic: 4522_Human_quadMut_3A_37T_48T_62T_n1
  source 1..72: mol_type = other DNA
ggaggaggctgctggtgaatattaaccaaggtcacctcagttatcggtggagcaaacagggtctaagtccac

SEQ ID NO: 517 - DNA, 72 bp, synthetic construct
  misc_feature 1..72: note = Synthetic: 4529_Human_quadMut_3T_45T_46T_62C_n1
  source 1..72: mol_type = other DNA
ggtggaggctgctggtgaatattaaccaaggtcaccccagttatttgaggagcaaacagggcctaagtccac

SEQ ID NO: 518 - DNA, 72 bp, synthetic construct
  misc_feature 1..72: note = Synthetic: 4533_Human_quadMut_3A_45G_48G_72A_n1
  source 1..72: mol_type = other DNA
ggaggaggctgctggtgaatattaaccaaggtcaccccagttatggggggagcaaacaggggctaagtccaa

SEQ ID NO: 519 - DNA, 72 bp, synthetic construct
  misc_feature 1..72: note = Synthetic: 4537_Human_quadMut_3A_46T_48T_52T_n1
  source 1..72: mol_type = other DNA
ggaggaggctgctggtgaatattaaccaaggtcaccccagttatctgtggatcaaacaggggctaagtccac

SEQ ID NO: 520 - DNA, 72 bp, synthetic construct
  misc_feature 1..72: note = Synthetic: 4539_Human_quadMut_3A_46T_48G_72G_n1
  source 1..72: mol_type = other DNA
ggaggaggctgctggtgaatattaaccaaggtcaccccagttatctggggagcaaacaggggctaagtccag

SEQ ID NO: 521 - DNA, 72 bp, synthetic construct
  misc_feature 1..72: note = Synthetic: 4541_Human_quadMut_3A_46T_52T_72A_n1
  source 1..72: mol_type = other DNA
ggaggaggctgctggtgaatattaaccaaggtcaccccagttatctgaggatcaaacaggggctaagtccaa

SEQ ID NO: 522 - DNA, 72 bp, synthetic construct
  misc_feature 1..72: note = Synthetic: 4543_Human_quadMut_3T_48T_52A_62T_n1
  source 1..72: mol_type = other DNA
ggtggaggctgctggtgaatattaaccaaggtcaccccagttatcggtggaacaaacagggtctaagtccac

SEQ ID NO: 523 - DNA, 72 bp, synthetic construct
  misc_feature 1..72: note = Synthetic: 4545_Human_quadMut_3A_48G_62T_72A_n1
  source 1..72: mol_type = other DNA
ggaggaggctgctggtgaatattaaccaaggtcaccccagttatcgggggagcaaacagggtctaagtccaa

SEQ ID NO: 524 - DNA, 72 bp, synthetic construct
  misc_feature 1..72: note = Synthetic: 4546_Human_quadMut_3T_52T_62T_72G_n1
  source 1..72: mol_type = other DNA
ggtggaggctgctggtgaatattaaccaaggtcaccccagttatcggaggatcaaacagggtctaagtccag

SEQ ID NO: 525 - DNA, 72 bp, synthetic construct
  misc_feature 1..72: note = Synthetic: 4549_Human_quadMut_8C_14T_35T_46T_n1
  source 1..72: mol_type = other DNA
gggggagcctgcttgtgaatattaaccaaggtcatcccagttatctgaggagcaaacaggggctaagtccac

SEQ ID NO: 526 - DNA, 72 bp, synthetic construct
  misc_feature 1..72: note = Synthetic: 4551_Human_quadMut_8T_14A_35T_52T_n1
  source 1..72: mol_type = other DNA
gggggagtctgctagtgaatattaaccaaggtcatcccagttatcggaggatcaaacaggggctaagtccac

SEQ ID NO: 527 - DNA, 72 bp, synthetic construct
  misc_feature 1..72: note = Synthetic: 4557_Human_quadMut_8A_14A_37T_52C_n1
  source 1..72: mol_type = other DNA
gggggagactgctagtgaatattaaccaaggtcacctcagttatcggaggaccaaacaggggctaagtccac

SEQ ID NO: 528 - DNA, 72 bp, synthetic construct
  misc_feature 1..72: note = Synthetic: 4562_Human_quadMut_8A_14T_45G_52T_n1
  source 1..72: mol_type = other DNA
gggggagactgcttgtgaatattaaccaaggtcaccccagttatgggaggatcaaacaggggctaagtccac

SEQ ID NO: 529 - DNA, 72 bp, synthetic construct
  misc_feature 1..72: note = Synthetic: 4563_Human_quadMut_8C_14A_45T_62T_n1
  source 1..72: mol_type = other DNA
gggggagcctgctagtgaatattaaccaaggtcaccccagttattggaggagcaaacagggtctaagtccac

SEQ ID NO: 530 - DNA, 72 bp, synthetic construct
  misc_feature 1..72: note = Synthetic: 4566_Human_quadMut_8T_14A_46A_52A_n1
  source 1..72: mol_type = other DNA
gggggagtctgctagtgaatattaaccaaggtcaccccagttatcagaggaacaaacaggggctaagtccac

SEQ ID NO: 531 - DNA, 72 bp, synthetic construct
  misc_feature 1..72: note = Synthetic: 4569_Human_quadMut_8A_14A_48T_52A_n1
  source 1..72: mol_type = other DNA
gggggagactgctagtgaatattaaccaaggtcaccccagttatcggtggaacaaacaggggctaagtccac

SEQ ID NO: 532 - DNA, 72 bp, synthetic construct
  misc_feature 1..72: note = Synthetic: 4576_Human_quadMut_8C_35A_37T_46T_n1
  source 1..72: mol_type = other DNA
gggggagcctgctggtgaatattaaccaaggtcaactcagttatctgaggagcaaacaggggctaagtccac

SEQ ID NO: 533 - DNA, 72 bp, synthetic construct
  misc_feature 1..72: note = Synthetic: 4579_Human_quadMut_8C_35G_37A_62A_n1
  source 1..72: mol_type = other DNA
gggggagcctgctggtgaatattaaccaaggtcagcacagttatcggaggagcaaacagggactaagtccac

SEQ ID NO: 534 - DNA, 72 bp, synthetic construct
  misc_feature 1..72: note = Synthetic: 4580_Human_quadMut_8C_35A_37A_72A_n1
  source 1..72: mol_type = other DNA
gggggagcctgctggtgaatattaaccaaggtcaacacagttatcggaggagcaaacaggggctaagtccaa

SEQ ID NO: 535 - DNA, 72 bp, synthetic construct
  misc_feature 1..72: note = Synthetic: 4587_Human_quadMut_8A_35G_46A_52T_n1
  source 1..72: mol_type = other DNA
gggggagactgctggtgaatattaaccaaggtcagcccagttatcagaggatcaaacaggggctaagtccac

SEQ ID NO: 536 - DNA, 72 bp, synthetic construct
  misc_feature 1..72: note = Synthetic: 4588_Human_quadMut_8A_35T_46A_62C_n1
  source 1..72: mol_type = other DNA
gggggagactgctggtgaatattaaccaaggtcatcccagttatcagaggagcaaacagggcctaagtccac

SEQ ID NO: 537 - DNA, 72 bp, synthetic construct
  misc_feature 1..72: note = Synthetic: 4590_Human_quadMut_8C_35G_48T_52A_n1
  source 1..72: mol_type = other DNA
gggggagcctgctggtgaatattaaccaaggtcagcccagttatcggtggaacaaacaggggctaagtccac

SEQ ID NO: 538 - DNA, 72 bp, synthetic construct
  misc_feature 1..72: note = Synthetic: 4592_Human_quadMut_8C_35G_48T_72A_n1
  source 1..72: mol_type = other DNA
gggggagcctgctggtgaatattaaccaaggtcagcccagttatcggtggagcaaacaggggctaagtccaa

SEQ ID NO: 539 - DNA, 72 bp, synthetic construct
  misc_feature 1..72: note = Synthetic: 4599_Human_quadMut_8A_37T_45G_62T_n1
  source 1..72: mol_type = other DNA
gggggagactgctggtgaatattaaccaaggtcacctcagttatgggaggagcaaacagggtctaagtccac

SEQ ID NO: 540 - DNA, 72 bp, synthetic construct
  misc_feature 1..72: note = Synthetic: 4600_Human_quadMut_8T_37T_45G_72T_n1
  source 1..72: mol_type = other DNA
gggggagtctgctggtgaatattaaccaaggtcacctcagttatgggaggagcaaacaggggctaagtccat

SEQ ID NO: 541 - DNA, 72 bp, synthetic construct
  misc_feature 1..72: note = Synthetic: 4601_Human_quadMut_8T_37T_46T_48T_n1
  source 1..72: mol_type = other DNA
gggggagtctgctggtgaatattaaccaaggtcacctcagttatctgtggagcaaacaggggctaagtccac

SEQ ID NO: 542 - DNA, 72 bp, synthetic construct
  misc_feature 1..72: note = Synthetic: 4607_Human_quadMut_8T_37A_48G_72T_n1
  source 1..72: mol_type = other DNA
gggggagtctgctggtgaatattaaccaaggtcaccacagttatcgggggagcaaacaggggctaagtccat

SEQ ID NO: 543 - DNA, 72 bp, synthetic construct
  misc_feature 1..72: note = Synthetic: 4608_Human_quadMut_8C_37T_52C_62T_n1
  source 1..72: mol_type = other DNA
gggggagcctgctggtgaatattaaccaaggtcacctcagttatcggaggaccaaacagggtctaagtccac

SEQ ID NO: 544 - DNA, 72 bp, synthetic construct
  misc_feature 1..72: note = Synthetic: 4609_Human_quadMut_8T_37T_52T_72G_n1
  source 1..72: mol_type = other DNA
gggggagtctgctggtgaatattaaccaaggtcacctcagttatcggaggatcaaacaggggctaagtccag

SEQ ID NO: 545 - DNA, 72 bp, synthetic construct
  misc_feature 1..72: note = Synthetic: 4616_Human_quadMut_8A_45G_48T_62A_n1
  source 1..72: mol_type = other DNA
gggggagactgctggtgaatattaaccaaggtcaccccagttatgggtggagcaaacagggactaagtccac

SEQ ID NO: 546 - DNA, 72 bp, synthetic construct
  misc_feature 1..72: note = Synthetic: 4619_Human_quadMut_8T_45A_52T_72G_n1
  source 1..72: mol_type = other DNA
gggggagtctgctggtgaatattaaccaaggtcaccccagttataggaggatcaaacaggggctaagtccag

SEQ ID NO: 547 - DNA, 72 bp, synthetic construct
  misc_feature 1..72: note = Synthetic: 4620_Human_quadMut_8A_45A_62T_72A_n1
  source 1..72: mol_type = other DNA
gggggagactgctggtgaatattaaccaaggtcaccccagttataggaggagcaaacagggtctaagtccaa

SEQ ID NO: 548 - DNA, 72 bp, synthetic construct
  misc_feature 1..72: note = Synthetic: 4622_Human_quadMut_8C_46A_48T_62A_n1
  source 1..72: mol_type = other DNA
gggggagcctgctggtgaatattaaccaaggtcaccccagttatcagtggagcaaacagggactaagtccac

SEQ ID NO: 549 - DNA, 72 bp, synthetic construct
  misc_feature 1..72: note = Synthetic: 4623_Human_quadMut_8A_46T_48T_72A_n1
  source 1..72: mol_type = other DNA
gggggagactgctggtgaatattaaccaaggtcaccccagttatctgtggagcaaacaggggctaagtccaa

SEQ ID NO: 550 - DNA, 72 bp, synthetic construct
  misc_feature 1..72: note = Synthetic: 4624_Human_quadMut_8A_46A_52T_62C_n1
  source 1..72: mol_type = other DNA
gggggagactgctggtgaatattaaccaaggtcaccccagttatcagaggatcaaacagggcctaagtccac

SEQ ID NO: 551 - DNA, 72 bp, synthetic construct
  misc_feature 1..72: note = Synthetic: 4626_Human_quadMut_8A_46A_62C_72T_n1
  source 1..72: mol_type = other DNA
gggggagactgctggtgaatattaaccaaggtcaccccagttatcagaggagcaaacagggcctaagtccat

SEQ ID NO: 552 - DNA, 72 bp, synthetic construct
  misc_feature 1..72: note = Synthetic: 4628_Human_quadMut_8C_48G_52A_72T_n1
  source 1..72: mol_type = other DNA
gggggagcctgctggtgaatattaaccaaggtcaccccagttatcgggggaacaaacaggggctaagtccat

SEQ ID NO: 553 - DNA, 72 bp, synthetic construct
  misc_feature 1..72: note = Synthetic: 4630_Human_quadMut_8C_52T_62T_72A_n1
  source 1..72: mol_type = other DNA
gggggagcctgctggtgaatattaaccaaggtcaccccagttatcggaggatcaaacagggtctaagtccaa

SEQ ID NO: 554 - DNA, 72 bp, synthetic construct
  misc_feature 1..72: note = Synthetic: 4632_Human_quadMut_14A_35G_37A_46A_n1
  source 1..72: mol_type = other DNA
gggggaggctgctagtgaatattaaccaaggtcagcacagttatcagaggagcaaacaggggctaagtccac

SEQ ID NO: 555 - DNA, 72 bp, synthetic construct
  misc_feature 1..72: note = Synthetic: 4633_Human_quadMut_14T_35A_37T_48G_n1
  source 1..72: mol_type = other DNA
gggggaggctgcttgtgaatattaaccaaggtcaactcagttatcgggggagcaaacaggggctaagtccac

SEQ ID NO: 556 - DNA, 72 bp, synthetic construct
  misc_feature 1..72: note = Synthetic: 4634_Human_quadMut_14A_35A_37A_52T_n1
  source 1..72: mol_type = other DNA
gggggaggctgctagtgaatattaaccaaggtcaacacagttatcggaggatcaaacaggggctaagtccac

SEQ ID NO: 557 - DNA, 72 bp, synthetic construct
  misc_feature 1..72: note = Synthetic: 4635_Human_quadMut_14A_35G_37A_62A_n1
  source 1..72: mol_type = other DNA
gggggaggctgctagtgaatattaaccaaggtcagcacagttatcggaggagcaaacagggactaagtccac

SEQ ID NO: 558 - DNA, 72 bp, synthetic construct
  misc_feature 1..72: note = Synthetic: 4638_Human_quadMut_14A_35G_45T_48T_n1
  source 1..72: mol_type = other DNA
gggggaggctgctagtgaatattaaccaaggtcagcccagttattggtggagcaaacaggggctaagtccac

SEQ ID NO: 559 - DNA, 72 bp, synthetic construct
  misc_feature 1..72: note = Synthetic: 4642_Human_quadMut_14T_35A_46A_48G_n1
  source 1..72: mol_type = other DNA
gggggaggctgcttgtgaatattaaccaaggtcaacccagttatcaggggagcaaacaggggctaagtccac

SEQ ID NO: 560 - DNA, 72 bp, synthetic construct
  misc_feature 1..72: note = Synthetic: 4643_Human_quadMut_14T_35T_46T_52A_n1
  source 1..72: mol_type = other DNA
gggggaggctgcttgtgaatattaaccaaggtcatcccagttatctgaggaacaaacaggggctaagtccac

SEQ ID NO: 561 - DNA, 72 bp, synthetic construct
  misc_feature 1..72: note = Synthetic: 4644_Human_quadMut_14A_35T_46A_62A_n1
  source 1..72: mol_type = other DNA
gggggaggctgctagtgaatattaaccaaggtcatcccagttatcagaggagcaaacagggactaagtccac

SEQ ID NO: 562 - DNA, 72 bp, synthetic construct
  misc_feature 1..72: note = Synthetic: 4647_Human_quadMut_14T_35T_48G_62C_n1
  source 1..72: mol_type = other DNA
gggggaggctgcttgtgaatattaaccaaggtcatcccagttatcgggggagcaaacagggcctaagtccac

SEQ ID NO: 563 - DNA, 72 bp, synthetic construct
  misc_feature 1..72: note = Synthetic: 4649_Human_quadMut_14A_35A_52T_62T_n1
  source 1..72: mol_type = other DNA
gggggaggctgctagtgaatattaaccaaggtcaacccagttatcggaggatcaaacagggtctaagtccac

SEQ ID NO: 564 - DNA, 72 bp, synthetic construct
  misc_feature 1..72: note = Synthetic: 4654_Human_quadMut_14T_37A_45T_52A_n1
  source 1..72: mol_type = other DNA
gggggaggctgcttgtgaatattaaccaaggtcaccacagttattggaggaacaaacaggggctaagtccac

SEQ ID NO: 565 - DNA, 72 bp, synthetic construct
  misc_feature 1..72: note = Synthetic: 4659_Human_quadMut_14A_37A_46A_62T_n1
  source 1..72: mol_type = other DNA
gggggaggctgctagtgaatattaaccaaggtcaccacagttatcagaggagcaaacagggtctaagtccac

SEQ ID NO: 566 - DNA, 72 bp, synthetic construct
  misc_feature 1..72: note = Synthetic: 4660_Human_quadMut_14A_37A_46T_72A_n1
  source 1..72: mol_type = other DNA
gggggaggctgctagtgaatattaaccaaggtcaccacagttatctgaggagcaaacaggggctaagtccaa

SEQ ID NO: 567 - DNA, 72 bp, synthetic construct
  misc_feature 1..72: note = Synthetic: 4661_Human_quadMut_14T_37T_48G_52T_n1
  source 1..72: mol_type = other DNA
gggggaggctgcttgtgaatattaaccaaggtcacctcagttatcgggggatcaaacaggggctaagtccac

SEQ ID NO: 568 - DNA, 72 bp, synthetic construct
  misc_feature 1..72: note = Synthetic: 4663_Human_quadMut_14T_37A_48G_72G_n1
  source 1..72: mol_type = other DNA
gggggaggctgcttgtgaatattaaccaaggtcaccacagttatcgggggagcaaacaggggctaagtccag

SEQ ID NO: 569 - DNA, 72 bp, synthetic construct
  misc_feature 1..72: note = Synthetic: 4668_Human_quadMut_14T_45T_46T_52T_n1
  source 1..72: mol_type = other DNA
gggggaggctgcttgtgaatattaaccaaggtcaccccagttatttgaggatcaaacaggggctaagtccac

SEQ ID NO: 570 - DNA, 72 bp, synthetic construct
  misc_feature 1..72: note = Synthetic: 4669_Human_quadMut_14A_45G_46T_62A_n1
  source 1..72: mol_type = other DNA
gggggaggctgctagtgaatattaaccaaggtcaccccagttatgtgaggagcaaacagggactaagtccac

SEQ ID NO: 571 - DNA, 72 bp, synthetic construct
  misc_feature 1..72: note = Synthetic: 4676_Human_quadMut_14A_45T_62A_72A_n1
  source 1..72: mol_type = other DNA
gggggaggctgctagtgaatattaaccaaggtcaccccagttattggaggagcaaacagggactaagtccaa

SEQ ID NO: 572 - DNA, 72 bp, synthetic construct
  misc_feature 1..72: note = Synthetic: 4678_Human_quadMut_14A_46T_48G_62C_n1
  source 1..72: mol_type = other DNA
gggggaggctgctagtgaatattaaccaaggtcaccccagttatctggggagcaaacagggcctaagtccac

SEQ ID NO: 573 - DNA, 72 bp, synthetic construct
  misc_feature 1..72: note = Synthetic: 4682_Human_quadMut_14A_46A_62C_72A_n1
  source 1..72: mol_type = other DNA
gggggaggctgctagtgaatattaaccaaggtcaccccagttatcagaggagcaaacagggcctaagtccaa

SEQ ID NO: 574 - DNA, 72 bp, synthetic construct
  misc_feature 1..72: note = Synthetic: 4683_Human_quadMut_14A_48G_52T_62A_n1
  source 1..72: mol_type = other DNA
gggggaggctgctagtgaatattaaccaaggtcaccccagttatcgggggatcaaacagggactaagtccac

SEQ ID NO: 575 - DNA, 72 bp, synthetic construct
  misc_feature 1..72: note = Synthetic: 4692_Human_quadMut_35G_37T_46A_48G_n1
  source 1..72: mol_type = other DNA
gggggaggctgctggtgaatattaaccaaggtcagctcagttatcaggggagcaaacaggggctaagtccac

SEQ ID NO: 576 - DNA, 72 bp, synthetic construct
  misc_feature 1..72: note = Synthetic: 4693_Human_quadMut_35A_37A_46T_52C_n1
  source 1..72: mol_type = other DNA
gggggaggctgctggtgaatattaaccaaggtcaacacagttatctgaggaccaaacaggggctaagtccac

SEQ ID NO: 577 - DNA, 72 bp, synthetic construct
  misc_feature 1..72: note = Synthetic: 4694_Human_quadMut_35T_37A_46T_62A_n1
  source 1..72: mol_type = other DNA
gggggaggctgctggtgaatattaaccaaggtcatcacagttatctgaggagcaaacagggactaagtccac

SEQ ID NO: 578 - DNA, 72 bp, synthetic construct
  misc_feature 1..72: note = Synthetic: 4695_Human_quadMut_35A_37A_46A_72A_n1
  source 1..72: mol_type = other DNA
gggggaggctgctggtgaatattaaccaaggtcaacacagttatcagaggagcaaacaggggctaagtccaa

SEQ ID NO: 579 - DNA, 72 bp, synthetic construct
  misc_feature 1..72: note = Synthetic: 4696_Human_quadMut_35G_37T_48G_52T_n1
  source 1..72: mol_type = other DNA
gggggaggctgctggtgaatattaaccaaggtcagctcagttatcgggggatcaaacaggggctaagtccac

SEQ ID NO: 580 - DNA, 72 bp, synthetic construct
  misc_feature 1..72: note = Synthetic: 4697_Human_quadMut_35T_37A_48T_62T_n1
  source 1..72: mol_type = other DNA
gggggaggctgctggtgaatattaaccaaggtcatcacagttatcggtggagcaaacagggtctaagtccac

SEQ ID NO: 581 - DNA, 72 bp, synthetic construct
  misc_feature 1..72: note = Synthetic: 4698_Human_quadMut_35A_37A_48G_72G_n1
  source 1..72: mol_type = other DNA
gggggaggctgctggtgaatattaaccaaggtcaacacagttatcgggggagcaaacaggggctaagtccag

SEQ ID NO: 582 - DNA, 72 bp, synthetic construct
  misc_feature 1..72: note = Synthetic: 4699_Human_quadMut_35A_37A_52T_62C_n1
  source 1..72: mol_type = other DNA
gggggaggctgctggtgaatattaaccaaggtcaacacagttatcggaggatcaaacagggcctaagtccac

SEQ ID NO: 583 - DNA, 72 bp, synthetic construct
  misc_feature 1..72: note = Synthetic: 4700_Human_quadMut_35G_37T_52T_72A_n1
  source 1..72: mol_type = other DNA
gggggaggctgctggtgaatattaaccaaggtcagctcagttatcggaggatcaaacaggggctaagtccaa

SEQ ID NO: 584 - DNA, 72 bp, synthetic construct
  misc_feature 1..72: note = Synthetic: 4702_Human_quadMut_35T_45T_46A_48G_n1
  source 1..72: mol_type = other DNA
gggggaggctgctggtgaatattaaccaaggtcatcccagttattaggggagcaaacaggggctaagtccac

SEQ ID NO: 585 - DNA, 72 bp, synthetic construct
  misc_feature 1..72: note = Synthetic: 4704_Human_quadMut_35G_45T_46T_62C_n1
  source 1..72: mol_type = other DNA
gggggaggctgctggtgaatattaaccaaggtcagcccagttatttgaggagcaaacagggcctaagtccac

SEQ ID NO: 586 - DNA, 72 bp, synthetic construct
  misc_feature 1..72: note = Synthetic: 4705_Human_quadMut_35T_45T_46T_72G_n1
  source 1..72: mol_type = other DNA
gggggaggctgctggtgaatattaaccaaggtcatcccagttatttgaggagcaaacaggggctaagtccag

SEQ ID NO: 587 - DNA, 72 bp, synthetic construct
  misc_feature 1..72: note = Synthetic: 4706_Human_quadMut_35A_45G_48T_52T_n1
  source 1..72: mol_type = other DNA
gggggaggctgctggtgaatattaaccaaggtcaacccagttatgggtggatcaaacaggggctaagtccac

SEQ ID NO: 588 - DNA, 72 bp, synthetic construct
  misc_feature 1..72: note = Synthetic: 4709_Human_quadMut_35A_45A_52T_62T_n1
  source 1..72: mol_type = other DNA
gggggaggctgctggtgaatattaaccaaggtcaacccagttataggaggatcaaacagggtctaagtccac

SEQ ID NO: 589 - DNA, 72 bp, synthetic construct
  misc_feature 1..72: note = Synthetic: 4712_Human_quadMut_35T_46A_48G_52A_n1
  source 1..72: mol_type = other DNA
gggggaggctgctggtgaatattaaccaaggtcatcccagttatcaggggaacaaacaggggctaagtccac

SEQ ID NO: 590 - DNA, 72 bp, synthetic construct
  misc_feature 1..72: note = Synthetic: 4714_Human_quadMut_35A_46T_48T_72T_n1
  source 1..72: mol_type = other DNA
gggggaggctgctggtgaatattaaccaaggtcaacccagttatctgtggagcaaacaggggctaagtccat

SEQ ID NO: 591 - DNA, 72 bp, synthetic construct
  misc_feature 1..72: note = Synthetic: 4717_Human_quadMut_35T_46A_62C_72A_n1
  source 1..72: mol_type = other DNA
gggggaggctgctggtgaatattaaccaaggtcatcccagttatcagaggagcaaacagggcctaagtccaa

SEQ ID NO: 592 - DNA, 72 bp, synthetic construct
  misc_feature 1..72: note = Synthetic: 4718_Human_quadMut_35T_48G_52C_62C_n1
  source 1..72: mol_type = other DNA
gggggaggctgctggtgaatattaaccaaggtcatcccagttatcgggggaccaaacagggcctaagtccac

SEQ ID NO: 593 - DNA, 72 bp, synthetic construct
  misc_feature 1..72: note = Synthetic: 4720_Human_quadMut_35G_48G_62C_72T_n1
  source 1..72: mol_type = other DNA
gggggaggctgctggtgaatattaaccaaggtcagcccagttatcgggggagcaaacagggcctaagtccat

SEQ ID NO: 594 - DNA, 72 bp, synthetic construct
  misc_feature 1..72: note = Synthetic: 4723_Human_quadMut_37T_45G_46A_52A_n1
  source 1..72: mol_type = other DNA
gggggaggctgctggtgaatattaaccaaggtcacctcagttatgagaggaacaaacaggggctaagtccac

SEQ ID NO: 595 - DNA, 72 bp, synthetic construct
  misc_feature 1..72: note = Synthetic: 4728_Human_quadMut_37T_45G_48T_72G_n1
  source 1..72: mol_type = other DNA
gggggaggctgctggtgaatattaaccaaggtcacctcagttatgggtggagcaaacaggggctaagtccag

SEQ ID NO: 596 - DNA, 72 bp, synthetic construct
  misc_feature 1..72: note = Synthetic: 4730_Human_quadMut_37T_45T_52A_72T_n1
  source 1..72: mol_type = other DNA
gggggaggctgctggtgaatattaaccaaggtcacctcagttattggaggaacaaacaggggctaagtccat

SEQ ID NO: 597 - DNA, 72 bp, synthetic construct
  misc_feature 1..72: note = Synthetic: 4733_Human_quadMut_37T_46T_48T_62T_n1
  source 1..72: mol_type = other DNA
gggggaggctgctggtgaatattaaccaaggtcacctcagttatctgtggagcaaacagggtctaagtccac

SEQ ID NO: 598 - DNA, 72 bp, synthetic construct
  misc_feature 1..72: note = Synthetic: 4734_Human_quadMut_37A_46T_48G_72G_n1
  source 1..72: mol_type = other DNA
gggggaggctgctggtgaatattaaccaaggtcaccacagttatctggggagcaaacaggggctaagtccag

SEQ ID NO: 599 - DNA, 72 bp, synthetic construct
  misc_feature 1..72: note = Synthetic: 4735_Human_quadMut_37A_46A_52T_62A_n1
  source 1..72: mol_type = other DNA
gggggaggctgctggtgaatattaaccaaggtcaccacagttatcagaggatcaaacagggactaagtccac

SEQ ID NO: 600 - DNA, 72 bp, synthetic construct
  misc_feature 1..72: note = Synthetic: 4736_Human_quadMut_37T_46T_52A_72A_n1
  source 1..72: mol_type = other DNA
gggggaggctgctggtgaatattaaccaaggtcacctcagttatctgaggaacaaacaggggctaagtccaa

SEQ ID NO: 601 - DNA, 72 bp, synthetic construct
  misc_feature 1..72: note = Synthetic: 4738_Human_quadMut_37T_48G_52A_62A_n1
  source 1..72: mol_type = other DNA
gggggaggctgctggtgaatattaaccaaggtcacctcagttatcgggggaacaaacagggactaagtccac

SEQ ID NO: 602 - DNA, 72 bp, synthetic construct
  misc_feature 1..72: note = Synthetic: 4739_Human_quadMut_37A_48G_52A_72A_n1
  source 1..72: mol_type = other DNA
gggggaggctgctggtgaatattaaccaaggtcaccacagttatcgggggaacaaacaggggctaagtccaa

SEQ ID NO: 603 - DNA, 72 bp, synthetic construct
  misc_feature 1..72: note = Synthetic: 4740_Human_quadMut_37T_48G_62C_72A_n1
  source 1..72: mol_type = other DNA
gggggaggctgctggtgaatattaaccaaggtcacctcagttatcgggggagcaaacagggcctaagtccaa

SEQ ID NO: 604 - DNA, 72 bp, synthetic construct
  misc_feature 1..72: note = Synthetic: 4742_Human_quadMut_45T_46T_48G_52C_n1
  source 1..72: mol_type = other DNA
gggggaggctgctggtgaatattaaccaaggtcaccccagttatttggggaccaaacaggggctaagtccac

SEQ ID NO: 605 - DNA, 72 bp, synthetic construct
  misc_feature 1..72: note = Synthetic: 4751_Human_quadMut_45T_52T_62T_72G_n1
  source 1..72: mol_type = other DNA
gggggaggctgctggtgaatattaaccaaggtcaccccagttattggaggatcaaacagggtctaagtccag

SEQ ID NO: 606 - DNA, 72 bp, synthetic construct
  misc_feature 1..72: note = Synthetic: 4755_Human_quadMut_46T_52T_62T_72G_n1
  source 1..72: mol_type = other DNA
gggggaggctgctggtgaatattaaccaaggtcaccccagttatctgaggatcaaacagggtctaagtccag

SEQ ID NO: 607 - DNA, 72 bp, synthetic construct
  misc_feature 1..72: note = Synthetic: 4761_Human_quadMut_1T_3T_8T_46A_n1
  source 1..72: mol_type = other DNA
tgtggagtctgctggtgaatattaaccaaggtcaccccagttatcagaggagcaaacaggggctaagtccac

SEQ ID NO: 608 - DNA, 72 bp, synthetic construct
  misc_feature 1..72: note = Synthetic: 4763_Human_quadMut_1A_3T_8T_52T_n1
  source 1..72: mol_type = other DNA
agtggagtctgctggtgaatattaaccaaggtcaccccagttatcggaggatcaaacaggggctaagtccac

SEQ ID NO: 609 - DNA, 72 bp, synthetic construct
  misc_feature 1..72: note = Synthetic: 4766_Human_quadMut_1A_3A_14A_35G_n1
  source 1..72: mol_type = other DNA
agaggaggctgctagtgaatattaaccaaggtcagcccagttatcggaggagcaaacaggggctaagtccac

SEQ ID NO: 610 - DNA, 72 bp, synthetic construct
  misc_feature 1..72: note = Synthetic: 4770_Human_quadMut_1A_3A_14A_48T_n1
  source 1..72: mol_type = other DNA
agaggaggctgctagtgaatattaaccaaggtcaccccagttatcggtggagcaaacaggggctaagtccac

SEQ ID NO: 611 - DNA, 72 bp, synthetic construct
  misc_feature 1..72: note = Synthetic: 4771_Human_quadMut_1A_3T_14A_52T_n1
  source 1..72: mol_type = other DNA
agtggaggctgctagtgaatattaaccaaggtcaccccagttatcggaggatcaaacaggggctaagtccac

SEQ ID NO: 612 - DNA, 72 bp, synthetic construct
  misc_feature 1..72: note = Synthetic: 4772_Human_quadMut_1T_3T_14A_62T_n1
  source 1..72: mol_type = other DNA
tgtggaggctgctagtgaatattaaccaaggtcaccccagttatcggaggagcaaacagggtctaagtccac

SEQ ID NO: 613 - DNA, 72 bp, synthetic construct
  misc_feature 1..72: note = Synthetic: 4776_Human_quadMut_1A_3A_35A_48G_n1
  source 1..72: mol_type = other DNA
agaggaggctgctggtgaatattaaccaaggtcaacccagttatcgggggagcaaacaggggctaagtccac

SEQ ID NO: 614 - DNA, 72 bp, synthetic construct
  misc_feature 1..72: note = Synthetic: 4777_Human_quadMut_1A_3A_35T_52C_n1
  source 1..72: mol_type = other DNA
agaggaggctgctggtgaatattaaccaaggtcatcccagttatcggaggaccaaacaggggctaagtccac

SEQ ID NO: 615 - DNA, 72 bp, synthetic construct
  misc_feature 1..72: note = Synthetic: 4778_Human_quadMut_1A_3T_35A_62T_n1
  source 1..72: mol_type = other DNA
agtggaggctgctggtgaatattaaccaaggtcaacccagttatcggaggagcaaacagggtctaagtccac

SEQ ID NO: 616 - DNA, 72 bp, synthetic construct
  misc_feature 1..72: note = Synthetic: 4779_Human_quadMut_1A_3A_35G_72A_n1
  source 1..72: mol_type = other DNA
agaggaggctgctggtgaatattaaccaaggtcagcccagttatcggaggagcaaacaggggctaagtccaa

SEQ ID NO: 617 - DNA, 72 bp, synthetic construct
  misc_feature 1..72: note = Synthetic: 4780_Human_quadMut_1T_3A_37T_45T_n1
  source 1..72: mol_type = other DNA
tgaggaggctgctggtgaatattaaccaaggtcacctcagttattggaggagcaaacaggggctaagtccac

SEQ ID NO: 618 - DNA, 72 bp, synthetic construct
  misc_feature 1..72: note = Synthetic: 4783_Human_quadMut_1T_3A_37T_52A_n1
  source 1..72: mol_type = other DNA
tgaggaggctgctggtgaatattaaccaaggtcacctcagttatcggaggaacaaacaggggctaagtccac

SEQ ID NO: 619 - DNA, 72 bp, synthetic construct
  misc_feature 1..72: note = Synthetic: 4784_Human_quadMut_1T_3A_37A_62T_n1
  source 1..72: mol_type = other DNA
tgaggaggctgctggtgaatattaaccaaggtcaccacagttatcggaggagcaaacagggtctaagtccac

SEQ ID NO: 620 - DNA, 72 bp, synthetic construct
  misc_feature 1..72: note = Synthetic: 4788_Human_quadMut_1T_3A_45A_52C_n1
  source 1..72: mol_type = other DNA
tgaggaggctgctggtgaatattaaccaaggtcaccccagttataggaggaccaaacaggggctaagtccac

SEQ ID NO: 621 - DNA, 72 bp, synthetic construct
  misc_feature 1..72: note = Synthetic: 4790_Human_quadMut_1A_3T_45G_72A_n1
  source 1..72: mol_type = other DNA
agtggaggctgctggtgaatattaaccaaggtcaccccagttatgggaggagcaaacaggggctaagtccaa

SEQ ID NO: 622 - DNA, 72 bp, synthetic construct
  misc_feature 1..72: note = Synthetic: 4791_Human_quadMut_1T_3T_46A_48T_n1
  source 1..72: mol_type = other DNA
tgtggaggctgctggtgaatattaaccaaggtcaccccagttatcagtggagcaaacaggggctaagtccac

SEQ ID NO: 623 - DNA, 72 bp, synthetic construct
  misc_feature 1..72: note = Synthetic: 4792_Human_quadMut_1A_3A_46T_52A_n1
  source 1..72: mol_type = other DNA
agaggaggctgctggtgaatattaaccaaggtcaccccagttatctgaggaacaaacaggggctaagtccac

SEQ ID NO: 624 - DNA, 72 bp, synthetic construct
  misc_feature 1..72: note = Synthetic: 4796_Human_quadMut_1T_3A_48T_62T_n1
  source 1..72: mol_type = other DNA
tgaggaggctgctggtgaatattaaccaaggtcaccccagttatcggtggagcaaacagggtctaagtccac

SEQ ID NO: 625 - DNA, 72 bp, synthetic construct
  misc_feature 1..72: note = Synthetic: 4798_Human_quadMut_1T_3A_52A_62C_n1
  source 1..72: mol_type = other DNA
tgaggaggctgctggtgaatattaaccaaggtcaccccagttatcggaggaacaaacagggcctaagtccac

SEQ ID NO: 626 - DNA, 72 bp, synthetic construct
  misc_feature 1..72: note = Synthetic: 4805_Human_quadMut_1T_8A_14T_48T_n1
  source 1..72: mol_type = other DNA
tggggagactgcttgtgaatattaaccaaggtcaccccagttatcggtggagcaaacaggggctaagtccac

SEQ ID NO: 627 - DNA, 72 bp, synthetic construct
  misc_feature 1..72: note = Synthetic: 4806_Human_quadMut_1A_8A_14A_52T_n1
  source 1..72: mol_type = other DNA
aggggagactgctagtgaatattaaccaaggtcaccccagttatcggaggatcaaacaggggctaagtccac

SEQ ID NO: 628 - DNA, 72 bp, synthetic construct
  misc_feature 1..72: note = Synthetic: 4809_Human_quadMut_1A_8C_35A_37A_n1
  source 1..72: mol_type = other DNA
aggggagcctgctggtgaatattaaccaaggtcaacacagttatcggaggagcaaacaggggctaagtccac

SEQ ID NO: 629 - DNA, 72 bp, synthetic construct
  misc_feature 1..72: note = Synthetic: 4810_Human_quadMut_1A_8C_35A_45A_n1
  source 1..72: mol_type = other DNA
aggggagcctgctggtgaatattaaccaaggtcaacccagttataggaggagcaaacaggggctaagtccac

SEQ ID NO: 630 - DNA, 72 bp, synthetic construct
  misc_feature 1..72: note = Synthetic: 4811_Human_quadMut_1A_8T_35G_46A_n1
  source 1..72: mol_type = other DNA
aggggagtctgctggtgaatattaaccaaggtcagcccagttatcagaggagcaaacaggggctaagtccac

SEQ ID NO: 631 - DNA, 72 bp, synthetic construct
  misc_feature 1..72: note = Synthetic: 4812_Human_quadMut_1T_8A_35T_48T_n1
  source 1..72: mol_type = other DNA
tggggagactgctggtgaatattaaccaaggtcatcccagttatcggtggagcaaacaggggctaagtccac

SEQ ID NO: 632 - DNA, 72 bp, synthetic construct
  misc_feature 1..72: note = Synthetic: 4819_Human_quadMut_1A_8T_37T_52T_n1
  source 1..72: mol_type = other DNA
aggggagtctgctggtgaatattaaccaaggtcacctcagttatcggaggatcaaacaggggctaagtccac

SEQ ID NO: 633 - DNA, 72 bp, synthetic construct
  misc_feature 1..72: note = Synthetic: 4820_Human_quadMut_1A_8A_37T_72G_n1
  source 1..72: mol_type = other DNA
aggggagactgctggtgaatattaaccaaggtcacctcagttatcggaggagcaaacaggggctaagtccag

SEQ ID NO: 634 - DNA, 72 bp, synthetic construct
  misc_feature 1..72: note = Synthetic: 4822_Human_quadMut_1T_8A_45A_48G_n1
  source 1..72: mol_type = other DNA
tggggagactgctggtgaatattaaccaaggtcaccccagttatagggggagcaaacaggggctaagtccac

SEQ ID NO: 635 - DNA, 72 bp, synthetic construct
  misc_feature 1..72: note = Synthetic: 4826_Human_quadMut_1T_8T_46T_48T_n1
  source 1..72: mol_type = other DNA
tggggagtctgctggtgaatattaaccaaggtcaccccagttatctgtggagcaaacaggggctaagtccac

SEQ ID NO: 636 - DNA, 72 bp, synthetic construct
  misc_feature 1..72: note = Synthetic: 4833_Human_quadMut_1T_8C_52T_72G_n1
  source 1..72: mol_type = other DNA
tggggagcctgctggtgaatattaaccaaggtcaccccagttatcggaggatcaaacaggggctaagtccag

SEQ ID NO: 637 - DNA, 72 bp, synthetic construct
  misc_feature 1..72: note = Synthetic: 4839_Human_quadMut_1A_14T_35T_52T_n1
  source 1..72: mol_type = other DNA
aggggaggctgcttgtgaatattaaccaaggtcatcccagttatcggaggatcaaacaggggctaagtccac

SEQ ID NO: 638 - DNA, 72 bp, synthetic construct
  misc_feature 1..72: note = Synthetic: 4853_Human_quadMut_1A_14A_46A_48G_n1
  source 1..72: mol_type = other DNA
aggggaggctgctagtgaatattaaccaaggtcaccccagttatcaggggagcaaacaggggctaagtccac

SEQ ID NO: 639 - DNA, 72 bp, synthetic construct
  misc_feature 1..72: note = Synthetic: 4864_Human_quadMut_1A_35A_37A_46T_n1
  source 1..72: mol_type = other DNA
aggggaggctgctggtgaatattaaccaaggtcaacacagttatctgaggagcaaacaggggctaagtccac

SEQ ID NO: 640 - DNA, 72 bp, synthetic construct
  misc_feature 1..72: note = Synthetic: 4867_Human_quadMut_1A_35A_37T_62C_n1
  source 1..72: mol_type = other DNA
aggggaggctgctggtgaatattaaccaaggtcaactcagttatcggaggagcaaacagggcctaagtccac

SEQ ID NO: 641 - DNA, 72 bp, synthetic construct
  misc_feature 1..72: note = Synthetic: 4872_Human_quadMut_1T_35A_45T_62T_n1
  source 1..72: mol_type = other DNA
tggggaggctgctggtgaatattaaccaaggtcaacccagttattggaggagcaaacagggtctaagtccac

SEQ ID NO: 642 - DNA, 72 bp, synthetic construct
  misc_feature 1..72: note = Synthetic: 4876_Human_quadMut_1A_35A_46A_62C_n1
  source 1..72: mol_type = other DNA
aggggaggctgctggtgaatattaaccaaggtcaacccagttatcagaggagcaaacagggcctaagtccac

SEQ ID NO: 643 - DNA, 72 bp, synthetic construct
  misc_feature 1..72: note = Synthetic: 4879_Human_quadMut_1A_35A_48T_62T_n1
  source 1..72: mol_type = other DNA
aggggaggctgctggtgaatattaaccaaggtcaacccagttatcggtggagcaaacagggtctaagtccac

SEQ ID NO: 644 - DNA, 72 bp, synthetic construct
  misc_feature 1..72: note = Synthetic: 4880_Human_quadMut_1A_35G_48G_72T_n1
  source 1..72: mol_type = other DNA
aggggaggctgctggtgaatattaaccaaggtcagcccagttatcgggggagcaaacaggggctaagtccat

SEQ ID NO: 645 - DNA, 72 bp, synthetic construct
  misc_feature 1..72: note = Synthetic: 4884_Human_quadMut_1A_37T_45T_46T_n1
  source 1..72: mol_type = other DNA
aggggaggctgctggtgaatattaaccaaggtcacctcagttatttgaggagcaaacaggggctaagtccac

SEQ ID NO: 646 - DNA, 72 bp, synthetic construct
  misc_feature 1..72: note = Synthetic: 4887_Human_quadMut_1A_37A_45T_62C_n1
  source 1..72: mol_type = other DNA
aggggaggctgctggtgaatattaaccaaggtcaccacagttattggaggagcaaacagggcctaagtccac

SEQ ID NO: 647 - DNA, 72 bp, synthetic construct
  misc_feature 1..72: note = Synthetic: 4890_Human_quadMut_1T_37A_46T_52T_n1
  source 1..72: mol_type = other DNA
tggggaggctgctggtgaatattaaccaaggtcaccacagttatctgaggatcaaacaggggctaagtccac

SEQ ID NO: 648 - DNA, 72 bp, synthetic construct
  misc_feature 1..72: note = Synthetic: 4891_Human_quadMut_1A_37A_46T_62A_n1
  source 1..72: mol_type = other DNA
aggggaggctgctggtgaatattaaccaaggtcaccacagttatctgaggagcaaacagggactaagtccac

SEQ ID NO: 649 - DNA, 72 bp, synthetic construct
  misc_feature 1..72: note = Synthetic: 4892_Human_quadMut_1T_37T_46A_72A_n1
  source 1..72: mol_type = other DNA
tggggaggctgctggtgaatattaaccaaggtcacctcagttatcagaggagcaaacaggggctaagtccaa

SEQ ID NO: 650 - DNA, 72 bp, synthetic construct
  misc_feature 1..72: note = Synthetic: 4894_Human_quadMut_1A_37A_48G_62A_n1
  source 1..72: mol_type = other DNA
aggggaggctgctggtgaatattaaccaaggtcaccacagttatcgggggagcaaacagggactaagtccac

SEQ ID NO: 651 - DNA, 72 bp, synthetic construct
  misc_feature 1..72: note = Synthetic: 4896_Human_quadMut_1T_37A_52T_62A_n1
  source 1..72: mol_type = other DNA
tggggaggctgctggtgaatattaaccaaggtcaccacagttatcggaggatcaaacagggactaagtccac

SEQ ID NO: 652 - DNA, 72 bp, synthetic construct
  misc_feature 1..72: note = Synthetic: 4898_Human_quadMut_1A_37T_62T_72T_n1
  source 1..72: mol_type = other DNA
aggggaggctgctggtgaatattaaccaaggtcacctcagttatcggaggagcaaacagggtctaagtccat

SEQ ID NO: 653 - DNA, 72 bp, synthetic construct
  misc_feature 1..72: note = Synthetic: 4907_Human_quadMut_1A_45G_52A_72A_n1
  source 1..72: mol_type = other DNA
aggggaggctgctggtgaatattaaccaaggtcaccccagttatgggaggaacaaacaggggctaagtccaa

SEQ ID NO: 654 - DNA, 72 bp, synthetic construct
  misc_feature 1..72: note = Synthetic: 4911_Human_quadMut_1A_46A_52A_62T_n1
  source 1..72: mol_type = other DNA
aggggaggctgctggtgaatattaaccaaggtcaccccagttatcagaggaacaaacagggtctaagtccac

SEQ ID NO: 655 - DNA, 72 bp, synthetic construct
  misc_feature 1..72: note = Synthetic: 4914_Human_quadMut_1A_48T_52T_62C_n1
  source 1..72: mol_type = other DNA
aggggaggctgctggtgaatattaaccaaggtcaccccagttatcggtggatcaaacagggcctaagtccac

SEQ ID NO: 656 - DNA, 72 bp, synthetic construct
  misc_feature 1..72: note = Synthetic: 4923_Human_quadMut_3A_8A_14A_52A_n1
  source 1..72: mol_type = other DNA
ggaggagactgctagtgaatattaaccaaggtcaccccagttatcggaggaacaaacaggggctaagtccac

SEQ ID NO: 657 - DNA, 72 bp, synthetic construct
  misc_feature 1..72: note = Synthetic: 4926_Human_quadMut_3A_8C_35A_37A_n1
  source 1..72: mol_type = other DNA
ggaggagcctgctggtgaatattaaccaaggtcaacacagttatcggaggagcaaacaggggctaagtccac

SEQ ID NO: 658 - DNA, 72 bp, synthetic construct
  misc_feature 1..72: note = Synthetic: 4932_Human_quadMut_3A_8C_35A_72A_n1
  source 1..72: mol_type = other DNA
ggaggagcctgctggtgaatattaaccaaggtcaacccagttatcggaggagcaaacaggggctaagtccaa

SEQ ID NO: 659 - DNA, 72 bp, synthetic construct
  misc_feature 1..72: note = Synthetic: 4934_Human_quadMut_3A_8C_37T_46T_n1
  source 1..72: mol_type = other DNA
ggaggagcctgctggtgaatattaaccaaggtcacctcagttatctgaggagcaaacaggggctaagtccac

SEQ ID NO: 660 - DNA, 72 bp, synthetic construct
  misc_feature 1..72: note = Synthetic: 4935_Human_quadMut_3T_8C_37A_48T_n1
  source 1..72: mol_type = other DNA
ggtggagcctgctggtgaatattaaccaaggtcaccacagttatcggtggagcaaacaggggctaagtccac

SEQ ID NO: 661 - DNA, 72 bp, synthetic construct
  misc_feature 1..72: note = Synthetic: 4943_Human_quadMut_3A_8A_46T_48T_n1
  source 1..72: mol_type = other DNA
ggaggagactgctggtgaatattaaccaaggtcaccccagttatctgtggagcaaacaggggctaagtccac

SEQ ID NO: 662 - DNA, 72 bp, synthetic construct
  misc_feature 1..72: note = Synthetic: 4944_Human_quadMut_3A_8A_46A_52T_n1
  source 1..72: mol_type = other DNA
ggaggagactgctggtgaatattaaccaaggtcaccccagttatcagaggatcaaacaggggctaagtccac

SEQ ID NO: 663 - DNA, 72 bp, synthetic construct
  misc_feature 1..72: note = Synthetic: 4947_Human_quadMut_3T_8T_48T_52T_n1
  source 1..72: mol_type = other DNA
ggtggagtctgctggtgaatattaaccaaggtcaccccagttatcggtggatcaaacaggggctaagtccac

SEQ ID NO: 664 - DNA, 72 bp, synthetic construct
  misc_feature 1..72: note = Synthetic: 4951_Human_quadMut_3T_8A_52A_72G_n1
  source 1..72: mol_type = other DNA
ggtggagactgctggtgaatattaaccaaggtcaccccagttatcggaggaacaaacaggggctaagtccag

SEQ ID NO: 665 - DNA, 72 bp, synthetic construct
  misc_feature 1..72: note = Synthetic: 4952_Human_quadMut_3T_8C_62T_72A_n1
  source 1..72: mol_type = other DNA
ggtggagcctgctggtgaatattaaccaaggtcaccccagttatcggaggagcaaacagggtctaagtccaa

SEQ ID NO: 666 - DNA, 72 bp, synthetic construct
  misc_feature 1..72: note = Synthetic: 4955_Human_quadMut_3T_14T_35T_46A_n1
  source 1..72: mol_type = other DNA
ggtggaggctgcttgtgaatattaaccaaggtcatcccagttatcagaggagcaaacaggggctaagtccac

SEQ ID NO: 667 - DNA, 72 bp, synthetic construct
  misc_feature 1..72: note = Synthetic: 4956_Human_quadMut_3A_14A_35G_48G_n1
  source 1..72: mol_type = other DNA
ggaggaggctgctagtgaatattaaccaaggtcagcccagttatcgggggagcaaacaggggctaagtccac

SEQ ID NO: 668 - DNA, 72 bp, synthetic construct
  misc_feature 1..72: note = Synthetic: 4957_Human_quadMut_3T_14T_35T_52T_n1
  source 1..72: mol_type = other DNA
ggtggaggctgcttgtgaatattaaccaaggtcatcccagttatcggaggatcaaacaggggctaagtccac

SEQ ID NO: 669 - DNA, 72 bp, synthetic construct
  misc_feature 1..72: note = Synthetic: 4975_Human_quadMut_3A_14A_48G_62T_n1
  source 1..72: mol_type = other DNA
ggaggaggctgctagtgaatattaaccaaggtcaccccagttatcgggggagcaaacagggtctaagtccac

SEQ ID NO: 670 - DNA, 72 bp, synthetic construct
  misc_feature 1..72: note = Synthetic: 4976_Human_quadMut_3A_14A_48T_72A_n1
  source 1..72: mol_type = other DNA
ggaggaggctgctagtgaatattaaccaaggtcaccccagttatcggtggagcaaacaggggctaagtccaa

SEQ ID NO: 671 - DNA, 72 bp, synthetic construct
  misc_feature 1..72: note = Synthetic: 4977_Human_quadMut_3T_14A_52A_62T_n1
  source 1..72: mol_type = other DNA
ggtggaggctgctagtgaatattaaccaaggtcaccccagttatcggaggaacaaacagggtctaagtccac

SEQ ID NO: 672 - DNA, 72 bp, synthetic construct
  misc_feature 1..72: note = Synthetic: 4980_Human_quadMut_3T_35A_37T_46T_n1
  source 1..72: mol_type = other DNA
ggtggaggctgctggtgaatattaaccaaggtcaactcagttatctgaggagcaaacaggggctaagtccac

SEQ ID NO: 673 - DNA, 72 bp, synthetic construct
  misc_feature 1..72: note = Synthetic: 4986_Human_quadMut_3T_35A_45A_48T_n1
  source 1..72: mol_type = other DNA
ggtggaggctgctggtgaatattaaccaaggtcaacccagttataggtggagcaaacaggggctaagtccac

SEQ ID NO: 674 - DNA, 72 bp, synthetic construct
  misc_feature 1..72: note = Synthetic: 4988_Human_quadMut_3T_35G_45T_62T_n1
  source 1..72: mol_type = other DNA
ggtggaggctgctggtgaatattaaccaaggtcagcccagttattggaggagcaaacagggtctaagtccac

SEQ ID NO: 675 - DNA, 72 bp, synthetic construct
  misc_feature 1..72: note = Synthetic: 4991_Human_quadMut_3A_35A_46A_52C_n1
  source 1..72: mol_type = other DNA
ggaggaggctgctggtgaatattaaccaaggtcaacccagttatcagaggaccaaacaggggctaagtccac

SEQ ID NO: 676 - DNA, 72 bp, synthetic construct
  misc_feature 1..72: note = Synthetic: 4992_Human_quadMut_3A_35T_46A_62A_n1
  source 1..72: mol_type = other DNA
ggaggaggctgctggtgaatattaaccaaggtcatcccagttatcagaggagcaaacagggactaagtccac

SEQ ID NO: 677 - DNA, 72 bp, synthetic construct
  misc_feature 1..72: note = Synthetic: 4993_Human_quadMut_3T_35T_46T_72T_n1
  source 1..72: mol_type = other DNA
ggtggaggctgctggtgaatattaaccaaggtcatcccagttatctgaggagcaaacaggggctaagtccat

SEQ ID NO: 678 - DNA, 72 bp, synthetic construct
  misc_feature 1..72: note = Synthetic: 4995_Human_quadMut_3T_35A_48T_62A_n1
  source 1..72: mol_type = other DNA
ggtggaggctgctggtgaatattaaccaaggtcaacccagttatcggtggagcaaacagggactaagtccac

SEQ ID NO: 679 - DNA, 72 bp, synthetic construct
  misc_feature 1..72: note = Synthetic: 4997_Human_quadMut_3A_35A_52T_62T_n1
  source 1..72: mol_type = other DNA
ggaggaggctgctggtgaatattaaccaaggtcaacccagttatcggaggatcaaacagggtctaagtccac

SEQ ID NO: 680 - DNA, 72 bp, synthetic construct
  misc_feature 1..72: note = Synthetic: 5000_Human_quadMut_3T_37T_45A_46A_n1
  source 1..72: mol_type = other DNA
ggtggaggctgctggtgaatattaaccaaggtcacctcagttataagaggagcaaacaggggctaagtccac

SEQ ID NO: 681 - DNA, 72 bp, synthetic construct
  misc_feature 1..72: note = Synthetic: 5003_Human_quadMut_3T_37A_45T_62T_n1
  source 1..72: mol_type = other DNA
ggtggaggctgctggtgaatattaaccaaggtcaccacagttattggaggagcaaacagggtctaagtccac

SEQ ID NO: 682 - DNA, 72 bp, synthetic construct
  misc_feature 1..72: note = Synthetic: 5004_Human_quadMut_3A_37T_46A_48G_n1
  source 1..72: mol_type = other DNA
ggaggaggctgctggtgaatattaaccaaggtcacctcagttatcaggggagcaaacaggggctaagtccac

SEQ ID NO: 683 - DNA, 72 bp, synthetic construct
  misc_feature 1..72: note = Synthetic: 5005_Human_quadMut_3A_37A_46T_52T_n1
  source 1..72: mol_type = other DNA
ggaggaggctgctggtgaatattaaccaaggtcaccacagttatctgaggatcaaacaggggctaagtccac

SEQ ID NO: 684 - DNA, 72 bp, synthetic construct
  misc_feature 1..72: note = Synthetic: 5006_Human_quadMut_3A_37A_46A_62T_n1
  source 1..72: mol_type = other DNA
ggaggaggctgctggtgaatattaaccaaggtcaccacagttatcagaggagcaaacagggtctaagtccac

SEQ ID NO: 685 - DNA, 72 bp, synthetic construct
  misc_feature 1..72: note = Synthetic: 5008_Human_quadMut_3A_37A_48G_52T_n1
  source 1..72: mol_type = other DNA
ggaggaggctgctggtgaatattaaccaaggtcaccacagttatcgggggatcaaacaggggctaagtccac

SEQ ID NO: 686 - DNA, 72 bp, synthetic construct
  misc_feature 1..72: note = Synthetic: 5010_Human_quadMut_3T_37A_48G_72A_n1
  source 1..72: mol_type = other DNA
ggtggaggctgctggtgaatattaaccaaggtcaccacagttatcgggggagcaaacaggggctaagtccaa

SEQ ID NO: 687 - DNA, 72 bp, synthetic construct
  misc_feature 1..72: note = Synthetic: 5019_Human_quadMut_3T_45G_48G_62T_n1
  source 1..72: mol_type = other DNA
ggtggaggctgctggtgaatattaaccaaggtcaccccagttatggggggagcaaacagggtctaagtccac

SEQ ID NO: 688 - DNA, 72 bp, synthetic construct
  misc_feature 1..72: note = Synthetic: 5025_Human_quadMut_3A_46A_48T_62C_n1
  source 1..72: mol_type = other DNA
ggaggaggctgctggtgaatattaaccaaggtcaccccagttatcagtggagcaaacagggcctaagtccac

SEQ ID NO: 689 - DNA, 72 bp, synthetic construct
  misc_feature 1..72: note = Synthetic: 5027_Human_quadMut_3T_46A_52A_62T_n1
  source 1..72: mol_type = other DNA
ggtggaggctgctggtgaatattaaccaaggtcaccccagttatcagaggaacaaacagggtctaagtccac

SEQ ID NO: 690 - DNA, 72 bp, synthetic construct
  misc_feature 1..72: note = Synthetic: 5030_Human_quadMut_3T_48G_52T_62T_n1
  source 1..72: mol_type = other DNA
ggtggaggctgctggtgaatattaaccaaggtcaccccagttatcgggggatcaaacagggtctaagtccac

SEQ ID NO: 691 - DNA, 72 bp, synthetic construct
  misc_feature 1..72: note = Synthetic: 5032_Human_quadMut_3A_48T_62C_72A_n1
  source 1..72: mol_type = other DNA
ggaggaggctgctggtgaatattaaccaaggtcaccccagttatcggtggagcaaacagggcctaagtccaa

SEQ ID NO: 692 - DNA, 72 bp, synthetic construct
  misc_feature 1..72: note = Synthetic: 5033_Human_quadMut_3T_52T_62C_72G_n1
  source 1..72: mol_type = other DNA
ggtggaggctgctggtgaatattaaccaaggtcaccccagttatcggaggatcaaacagggcctaagtccag

SEQ ID NO: 693 - DNA, 72 bp, synthetic construct
  misc_feature 1..72: note = Synthetic: 5036_Human_quadMut_8T_14A_35T_46T_n1
  source 1..72: mol_type = other DNA
gggggagtctgctagtgaatattaaccaaggtcatcccagttatctgaggagcaaacaggggctaagtccac

SEQ ID NO: 694 - DNA, 72 bp, synthetic construct
  misc_feature 1..72: note = Synthetic: 5037_Human_quadMut_8C_14T_35T_48G_n1
  source 1..72: mol_type = other DNA
gggggagcctgcttgtgaatattaaccaaggtcatcccagttatcgggggagcaaacaggggctaagtccac

SEQ ID NO: 695 - DNA, 72 bp, synthetic construct
  misc_feature 1..72: note = Synthetic: 5040_Human_quadMut_8T_14A_35G_72G_n1
  source 1..72: mol_type = other DNA
gggggagtctgctagtgaatattaaccaaggtcagcccagttatcggaggagcaaacaggggctaagtccag

SEQ ID NO: 696 - DNA, 72 bp, synthetic construct
  misc_feature 1..72: note = Synthetic: 5041_Human_quadMut_8T_14A_37T_45T_n1
  source 1..72: mol_type = other DNA
gggggagtctgctagtgaatattaaccaaggtcacctcagttattggaggagcaaacaggggctaagtccac

SEQ ID NO: 697 - DNA, 72 bp, synthetic construct
  misc_feature 1..72: note = Synthetic: 5042_Human_quadMut_8C_14A_37T_46A_n1
  source 1..72: mol_type = other DNA
gggggagcctgctagtgaatattaaccaaggtcacctcagttatcagaggagcaaacaggggctaagtccac

SEQ ID NO: 698 - DNA, 72 bp, synthetic construct
  misc_feature 1..72: note = Synthetic: 5043_Human_quadMut_8A_14A_37A_48G_n1
  source 1..72: mol_type = other DNA
gggggagactgctagtgaatattaaccaaggtcaccacagttatcgggggagcaaacaggggctaagtccac

SEQ ID NO: 699 - DNA, 72 bp, synthetic construct
  misc_feature 1..72: note = Synthetic: 5051_Human_quadMut_8C_14T_46A_52T_n1
  source 1..72: mol_type = other DNA
gggggagcctgcttgtgaatattaaccaaggtcaccccagttatcagaggatcaaacaggggctaagtccac

SEQ ID NO: 700 - DNA, 72 bp, synthetic construct
  misc_feature 1..72: note = Synthetic: 5052_Human_quadMut_8A_14T_46A_62C_n1
  source 1..72: mol_type = other DNA
gggggagactgcttgtgaatattaaccaaggtcaccccagttatcagaggagcaaacagggcctaagtccac

SEQ ID NO: 701 - DNA, 72 bp, synthetic construct
  misc_feature 1..72: note = Synthetic: 5056_Human_quadMut_8C_14A_48G_72A_n1
  source 1..72: mol_type = other DNA
gggggagcctgctagtgaatattaaccaaggtcaccccagttatcgggggagcaaacaggggctaagtccaa

SEQ ID NO: 702 - DNA, 72 bp, synthetic construct
  misc_feature 1..72: note = Synthetic: 5057_Human_quadMut_8T_14A_52A_62C_n1
  source 1..72: mol_type = other DNA
gggggagtctgctagtgaatattaaccaaggtcaccccagttatcggaggaacaaacagggcctaagtccac

SEQ ID NO: 703 - DNA, 72 bp, synthetic construct
  misc_feature 1..72: note = Synthetic: 5063_Human_quadMut_8A_35A_37A_52T_n1
  source 1..72: mol_type = other DNA
gggggagactgctggtgaatattaaccaaggtcaacacagttatcggaggatcaaacaggggctaagtccac

SEQ ID NO: 704 - DNA, 72 bp, synthetic construct
  misc_feature 1..72: note = Synthetic: 5071_Human_quadMut_8T_35A_46T_48T_n1
  source 1..72: mol_type = other DNA
gggggagtctgctggtgaatattaaccaaggtcaacccagttatctgtggagcaaacaggggctaagtccac

SEQ ID NO: 705 - DNA, 72 bp, synthetic construct
  misc_feature 1..72: note = Synthetic: 5072_Human_quadMut_8A_35G_46T_52T_n1
  source 1..72: mol_type = other DNA
gggggagactgctggtgaatattaaccaaggtcagcccagttatctgaggatcaaacaggggctaagtccac

SEQ ID NO: 706 - DNA, 72 bp, synthetic construct
  misc_feature 1..72: note = Synthetic: 5073_Human_quadMut_8T_35G_46T_62T_n1
  source 1..72: mol_type = other DNA
gggggagtctgctggtgaatattaaccaaggtcagcccagttatctgaggagcaaacagggtctaagtccac

SEQ ID NO: 707 - DNA, 72 bp, synthetic construct
  misc_feature 1..72: note = Synthetic: 5074_Human_quadMut_8T_35G_46T_72A_n1
  source 1..72: mol_type = other DNA
gggggagtctgctggtgaatattaaccaaggtcagcccagttatctgaggagcaaacaggggctaagtccaa

SEQ ID NO: 708 - DNA, 72 bp, synthetic construct
  misc_feature 1..72: note = Synthetic: 5075_Human_quadMut_8T_35T_48G_52T_n1
  source 1..72: mol_type = other DNA
gggggagtctgctggtgaatattaaccaaggtcatcccagttatcgggggatcaaacaggggctaagtccac

SEQ ID NO: 709 - DNA, 72 bp, synthetic construct
  misc_feature 1..72: note = Synthetic: 5080_Human_quadMut_8A_35T_62T_72G_n1
  source 1..72: mol_type = other DNA
gggggagactgctggtgaatattaaccaaggtcatcccagttatcggaggagcaaacagggtctaagtccag

SEQ ID NO: 710 - DNA, 72 bp, synthetic construct
  misc_feature 1..72: note = Synthetic: 5081_Human_quadMut_8A_37A_45A_46T_n1
  source 1..72: mol_type = other DNA
gggggagactgctggtgaatattaaccaaggtcaccacagttatatgaggagcaaacaggggctaagtccac

SEQ ID NO: 711 - DNA, 72 bp, synthetic construct
  misc_feature 1..72: note = Synthetic: 5083_Human_quadMut_8T_37T_45T_52T_n1
  source 1..72: mol_type = other DNA
gggggagtctgctggtgaatattaaccaaggtcacctcagttattggaggatcaaacaggggctaagtccac

SEQ ID NO: 712 - DNA, 72 bp, synthetic construct
  misc_feature 1..72: note = Synthetic: 5085_Human_quadMut_8T_37T_45T_72T_n1
  source 1..72: mol_type = other DNA
gggggagtctgctggtgaatattaaccaaggtcacctcagttattggaggagcaaacaggggctaagtccat

SEQ ID NO: 713 - DNA, 72 bp, synthetic construct
  misc_feature 1..72: note = Synthetic: 5086_Human_quadMut_8A_37T_46T_48G_n1
  source 1..72: mol_type = other DNA
gggggagactgctggtgaatattaaccaaggtcacctcagttatctggggagcaaacaggggctaagtccac

SEQ ID NO: 714 - DNA, 72 bp, synthetic construct
  misc_feature 1..72: note = Synthetic: 5087_Human_quadMut_8A_37A_46A_52A_n1
  source 1..72: mol_type = other DNA
gggggagactgctggtgaatattaaccaaggtcaccacagttatcagaggaacaaacaggggctaagtccac

SEQ ID NO: 715 - DNA, 72 bp, synthetic construct
  misc_feature 1..72: note = Synthetic: 5088_Human_quadMut_8A_37A_46A_62C_n1
  source 1..72: mol_type = other DNA
gggggagactgctggtgaatattaaccaaggtcaccacagttatcagaggagcaaacagggcctaagtccac

SEQ ID NO: 716 - DNA, 72 bp, synthetic construct
  misc_feature 1..72: note = Synthetic: 5089_Human_quadMut_8T_37A_46T_72A_n1
  source 1..72: mol_type = other DNA
gggggagtctgctggtgaatattaaccaaggtcaccacagttatctgaggagcaaacaggggctaagtccaa

SEQ ID NO: 717 - DNA, 72 bp, synthetic construct
  misc_feature 1..72: note = Synthetic: 5090_Human_quadMut_8A_37A_48G_52T_n1
  source 1..72: mol_type = other DNA
gggggagactgctggtgaatattaaccaaggtcaccacagttatcgggggatcaaacaggggctaagtccac

SEQ ID NO: 718 - DNA, 72 bp, synthetic construct
  misc_feature 1..72: note = Synthetic: 5092_Human_quadMut_8T_37T_48T_72G_n1
  source 1..72: mol_type = other DNA
gggggagtctgctggtgaatattaaccaaggtcacctcagttatcggtggagcaaacaggggctaagtccag

SEQ ID NO: 719 - DNA, 72 bp, synthetic construct
  misc_feature 1..72: note = Synthetic: 5093_Human_quadMut_8C_37A_52T_62T_n1
  source 1..72: mol_type = other DNA
gggggagcctgctggtgaatattaaccaaggtcaccacagttatcggaggatcaaacagggtctaagtccac

SEQ ID NO: 720 - DNA, 72 bp, synthetic construct
  misc_feature 1..72: note = Synthetic: 5100_Human_quadMut_8T_45G_48G_52A_n1
  source 1..72: mol_type = other DNA
gggggagtctgctggtgaatattaaccaaggtcaccccagttatggggggaacaaacaggggctaagtccac

SEQ ID NO: 721 - DNA, 72 bp, synthetic construct
  misc_feature 1..72: note = Synthetic: 5104_Human_quadMut_8T_45G_52T_72G_n1
  source 1..72: mol_type = other DNA
gggggagtctgctggtgaatattaaccaaggtcaccccagttatgggaggatcaaacaggggctaagtccag

SEQ ID NO: 722 - DNA, 72 bp, synthetic construct
  misc_feature 1..72: note = Synthetic: 5107_Human_quadMut_8A_46A_48T_62T_n1
  source 1..72: mol_type = other DNA
gggggagactgctggtgaatattaaccaaggtcaccccagttatcagtggagcaaacagggtctaagtccac

SEQ ID NO: 723 - DNA, 72 bp, synthetic construct
  misc_feature 1..72: note = Synthetic: 5109_Human_quadMut_8A_46T_52T_62T_n1
  source 1..72: mol_type = other DNA
gggggagactgctggtgaatattaaccaaggtcaccccagttatctgaggatcaaacagggtctaagtccac

SEQ ID NO: 724 - DNA, 72 bp, synthetic construct
  misc_feature 1..72: note = Synthetic: 5110_Human_quadMut_8C_46T_52C_72A_n1
  source 1..72: mol_type = other DNA
gggggagcctgctggtgaatattaaccaaggtcaccccagttatctgaggaccaaacaggggctaagtccaa

SEQ ID NO: 725 - DNA, 72 bp, synthetic construct
  misc_feature 1..72: note = Synthetic: 5115_Human_quadMut_8T_52A_62A_72T_n1
  source 1..72: mol_type = other DNA
gggggagtctgctggtgaatattaaccaaggtcaccccagttatcggaggaacaaacagggactaagtccat

SEQ ID NO: 726 - DNA, 72 bp, synthetic construct
  misc_feature 1..72: note = Synthetic: 5119_Human_quadMut_14A_35G_37A_52A_n1
  source 1..72: mol_type = other DNA
gggggaggctgctagtgaatattaaccaaggtcagcacagttatcggaggaacaaacaggggctaagtccac

SEQ ID NO: 727 - DNA, 72 bp, synthetic construct
  misc_feature 1..72: note = Synthetic: 5128_Human_quadMut_14T_35T_46A_52A_n1
  source 1..72: mol_type = other DNA
gggggaggctgcttgtgaatattaaccaaggtcatcccagttatcagaggaacaaacaggggctaagtccac

SEQ ID NO: 728 - DNA, 72 bp, synthetic construct
  misc_feature 1..72: note = Synthetic: 5132_Human_quadMut_14A_35G_48T_62T_n1
  source 1..72: mol_type = other DNA
gggggaggctgctagtgaatattaaccaaggtcagcccagttatcggtggagcaaacagggtctaagtccac

SEQ ID NO: 729 - DNA, 72 bp, synthetic construct
  misc_feature 1..72: note = Synthetic: 5133_Human_quadMut_14A_35T_48T_72G_n1
  source 1..72: mol_type = other DNA
gggggaggctgctagtgaatattaaccaaggtcatcccagttatcggtggagcaaacaggggctaagtccag

SEQ ID NO: 730 - DNA, 72 bp, synthetic construct
  misc_feature 1..72: note = Synthetic: 5134_Human_quadMut_14T_35G_52T_62C_n1
  source 1..72: mol_type = other DNA
gggggaggctgcttgtgaatattaaccaaggtcagcccagttatcggaggatcaaacagggcctaagtccac

SEQ ID NO: 731 - DNA, 72 bp, synthetic construct
  misc_feature 1..72: note = Synthetic: 5135_Human_quadMut_14T_35A_52T_72G_n1
  source 1..72: mol_type = other DNA
gggggaggctgcttgtgaatattaaccaaggtcaacccagttatcggaggatcaaacaggggctaagtccag

SEQ ID NO: 732 - DNA, 72 bp, synthetic construct
  misc_feature 1..72: note = Synthetic: 5140_Human_quadMut_14A_37T_45G_62T_n1
  source 1..72: mol_type = other DNA
gggggaggctgctagtgaatattaaccaaggtcacctcagttatgggaggagcaaacagggtctaagtccac

SEQ ID NO: 733 - DNA, 72 bp, synthetic construct
  misc_feature 1..72: note = Synthetic: 5142_Human_quadMut_14A_37A_46A_48T_n1
  source 1..72: mol_type = other DNA
gggggaggctgctagtgaatattaaccaaggtcaccacagttatcagtggagcaaacaggggctaagtccac

SEQ ID NO: 734 - DNA, 72 bp, synthetic construct
  misc_feature 1..72: note = Synthetic: 5145_Human_quadMut_14A_37T_46T_72A_n1
  source 1..72: mol_type = other DNA
gggggaggctgctagtgaatattaaccaaggtcacctcagttatctgaggagcaaacaggggctaagtccaa

SEQ ID NO: 735 - DNA, 72 bp, synthetic construct
  misc_feature 1..72: note = Synthetic: 5146_Human_quadMut_14A_37T_48G_52A_n1
  source 1..72: mol_type = other DNA
gggggaggctgctagtgaatattaaccaaggtcacctcagttatcgggggaacaaacaggggctaagtccac

SEQ ID NO: 736 - DNA, 72 bp, synthetic construct
  misc_feature 1..72: note = Synthetic: 5147_Human_quadMut_14A_37T_48T_62C_n1
  source 1..72: mol_type = other DNA
gggggaggctgctagtgaatattaaccaaggtcacctcagttatcggtggagcaaacagggcctaagtccac

SEQ ID NO: 737 - DNA, 72 bp, synthetic construct
  misc_feature 1..72: note = Synthetic: 5148_Human_quadMut_14A_37T_48G_72A_n1
  source 1..72: mol_type = other DNA
gggggaggctgctagtgaatattaaccaaggtcacctcagttatcgggggagcaaacaggggctaagtccaa

SEQ ID NO: 738 - DNA, 72 bp, synthetic construct
  misc_feature 1..72: note = Synthetic: 5155_Human_quadMut_14T_45T_46T_72G_n1
  source 1..72: mol_type = other DNA
gggggaggctgcttgtgaatattaaccaaggtcaccccagttatttgaggagcaaacaggggctaagtccag

SEQ ID NO: 739 - DNA, 72 bp, synthetic construct
  misc_feature 1..72: note = Synthetic: 5157_Human_quadMut_14T_45G_48G_62T_n1
  source 1..72: mol_type = other DNA
gggggaggctgcttgtgaatattaaccaaggtcaccccagttatggggggagcaaacagggtctaagtccac

SEQ ID NO: 740 - DNA, 72 bp, synthetic construct
  misc_feature 1..72: note = Synthetic: 5164_Human_quadMut_14T_46A_52T_62T_n1
  source 1..72: mol_type = other DNA
gggggaggctgcttgtgaatattaaccaaggtcaccccagttatcagaggatcaaacagggtctaagtccac

SEQ ID NO: 741 - DNA, 72 bp, synthetic construct
  misc_feature 1..72: note = Synthetic: 5165_Human_quadMut_14T_46A_52T_72G_n1
  source 1..72: mol_type = other DNA
gggggaggctgcttgtgaatattaaccaaggtcaccccagttatcagaggatcaaacaggggctaagtccag

SEQ ID NO: 742 - DNA, 72 bp, synthetic construct
  misc_feature 1..72: note = Synthetic: 5167_Human_quadMut_14A_48G_52A_62C_n1
  source 1..72: mol_type = other DNA
gggggaggctgctagtgaatattaaccaaggtcaccccagttatcgggggaacaaacagggcctaagtccac

SEQ ID NO: 743 - DNA, 72 bp, synthetic construct
  misc_feature 1..72: note = Synthetic: 5171_Human_quadMut_35G_37A_45T_46T_n1
  source 1..72: mol_type = other DNA
gggggaggctgctggtgaatattaaccaaggtcagcacagttatttgaggagcaaacaggggctaagtccac

SEQ ID NO: 744 - DNA, 72 bp, synthetic construct
  misc_feature 1..72: note = Synthetic: 5175_Human_quadMut_35T_37A_46A_48G_n1
  source 1..72: mol_type = other DNA
gggggaggctgctggtgaatattaaccaaggtcatcacagttatcaggggagcaaacaggggctaagtccac

SEQ ID NO: 745 - DNA, 72 bp, synthetic construct
  misc_feature 1..72: note = Synthetic: 5177_Human_quadMut_35G_37A_46A_72A_n1
  source 1..72: mol_type = other DNA
gggggaggctgctggtgaatattaaccaaggtcagcacagttatcagaggagcaaacaggggctaagtccaa

SEQ ID NO: 746 - DNA, 72 bp, synthetic construct
  misc_feature 1..72: note = Synthetic: 5178_Human_quadMut_35G_37A_48G_52A_n1
  source 1..72: mol_type = other DNA
gggggaggctgctggtgaatattaaccaaggtcagcacagttatcgggggaacaaacaggggctaagtccac

SEQ ID NO: 747 - DNA, 72 bp, synthetic construct
  misc_feature 1..72: note = Synthetic: 5179_Human_quadMut_35T_37T_48T_62A_n1
  source 1..72: mol_type = other DNA
gggggaggctgctggtgaatattaaccaaggtcatctcagttatcggtggagcaaacagggactaagtccac

SEQ ID NO: 748 - DNA, 72 bp, synthetic construct
  misc_feature 1..72: note = Synthetic: 5181_Human_quadMut_35T_37A_52A_62A_n1
  source 1..72: mol_type = other DNA
gggggaggctgctggtgaatattaaccaaggtcatcacagttatcggaggaacaaacagggactaagtccac

SEQ ID NO: 749 - DNA, 72 bp, synthetic construct
  misc_feature 1..72: note = Synthetic: 5185_Human_quadMut_35T_45A_46T_52A_n1
  source 1..72: mol_type = other DNA
gggggaggctgctggtgaatattaaccaaggtcatcccagttatatgaggaacaaacaggggctaagtccac

SEQ ID NO: 750 - DNA, 72 bp, synthetic construct
  misc_feature 1..72: note = Synthetic: 5186_Human_quadMut_35T_45T_46T_62T_n1
  source 1..72: mol_type = other DNA
gggggaggctgctggtgaatattaaccaaggtcatcccagttatttgaggagcaaacagggtctaagtccac

SEQ ID NO: 751 - DNA, 72 bp, synthetic construct
  misc_feature 1..72: note = Synthetic: 5188_Human_quadMut_35A_45A_48T_52A_n1
  source 1..72: mol_type = other DNA
gggggaggctgctggtgaatattaaccaaggtcaacccagttataggtggaacaaacaggggctaagtccac

SEQ ID NO: 752 - DNA, 72 bp, synthetic construct
  misc_feature 1..72: note = Synthetic: 5194_Human_quadMut_35G_46T_48G_52C_n1
  source 1..72: mol_type = other DNA
gggggaggctgctggtgaatattaaccaaggtcagcccagttatctggggaccaaacaggggctaagtccac

SEQ ID NO: 753 - DNA, 72 bp, synthetic construct
  misc_feature 1..72: note = Synthetic: 5195_Human_quadMut_35T_46A_48G_62A_n1
  source 1..72: mol_type = other DNA
gggggaggctgctggtgaatattaaccaaggtcatcccagttatcaggggagcaaacagggactaagtccac

SEQ ID NO: 754 - DNA, 72 bp, synthetic construct
  misc_feature 1..72: note = Synthetic: 5196_Human_quadMut_35A_46T_48G_72A_n1
  source 1..72: mol_type = other DNA
gggggaggctgctggtgaatattaaccaaggtcaacccagttatctggggagcaaacaggggctaagtccaa

SEQ ID NO: 755 - DNA, 72 bp, synthetic construct
  misc_feature 1..72: note = Synthetic: 5197_Human_quadMut_35A_46T_52C_62T_n1
  source 1..72: mol_type = other DNA
gggggaggctgctggtgaatattaaccaaggtcaacccagttatctgaggaccaaacagggtctaagtccac

SEQ ID NO: 756 - DNA, 72 bp, synthetic construct
  misc_feature 1..72: note = Synthetic: 5200_Human_quadMut_35A_48G_52A_62A_n1
  source 1..72: mol_type = other DNA
gggggaggctgctggtgaatattaaccaaggtcaacccagttatcgggggaacaaacagggactaagtccac

SEQ ID NO: 757 - DNA, 72 bp, synthetic construct
  misc_feature 1..72: note = Synthetic: 5201_Human_quadMut_35A_48T_52T_72A_n1
  source 1..72: mol_type = other DNA
gggggaggctgctggtgaatattaaccaaggtcaacccagttatcggtggatcaaacaggggctaagtccaa

SEQ ID NO: 758 - DNA, 72 bp, synthetic construct
  misc_feature 1..72: note = Synthetic: 5202_Human_quadMut_35T_48G_62C_72T_n1
  source 1..72: mol_type = other DNA
gggggaggctgctggtgaatattaaccaaggtcatcccagttatcgggggagcaaacagggcctaagtccat

SEQ ID NO: 759 - DNA, 72 bp, synthetic construct
  misc_feature 1..72: note = Synthetic: 5203_Human_quadMut_35T_52T_62T_72T_n1
  source 1..72: mol_type = other DNA
gggggaggctgctggtgaatattaaccaaggtcatcccagttatcggaggatcaaacagggtctaagtccat

SEQ ID NO: 760 - DNA, 72 bp, synthetic construct
  misc_feature 1..72: note = Synthetic: 5204_Human_quadMut_37A_45G_46A_48G_n1
  source 1..72: mol_type = other DNA
gggggaggctgctggtgaatattaaccaaggtcaccacagttatgaggggagcaaacaggggctaagtccac

SEQ ID NO: 761 - DNA, 72 bp, synthetic construct
  misc_feature 1..72: note = Synthetic: 5205_Human_quadMut_37A_45A_46A_62T_n1
  source 1..72: mol_type = other DNA
gggggaggctgctggtgaatattaaccaaggtcaccacagttataagaggagcaaacagggtctaagtccac

SEQ ID NO: 762 - DNA, 72 bp, synthetic construct
  misc_feature 1..72: note = Synthetic: 5208_Human_quadMut_37T_45T_48G_62T_n1
  source 1..72: mol_type = other DNA
gggggaggctgctggtgaatattaaccaaggtcacctcagttattgggggagcaaacagggtctaagtccac

SEQ ID NO: 763 - DNA, 72 bp, synthetic construct
  misc_feature 1..72: note = Synthetic: 5210_Human_quadMut_37A_45G_52A_62C_n1
  source 1..72: mol_type = other DNA
gggggaggctgctggtgaatattaaccaaggtcaccacagttatgggaggaacaaacagggcctaagtccac

SEQ ID NO: 764 - DNA, 72 bp, synthetic construct
  misc_feature 1..72: note = Synthetic: 5213_Human_quadMut_37A_46A_48G_52T_n1
  source 1..72: mol_type = other DNA
gggggaggctgctggtgaatattaaccaaggtcaccacagttatcaggggatcaaacaggggctaagtccac

SEQ ID NO: 765 - DNA, 72 bp, synthetic construct
  misc_feature 1..72: note = Synthetic: 5214_Human_quadMut_37A_46A_48G_62A_n1
  source 1..72: mol_type = other DNA
gggggaggctgctggtgaatattaaccaaggtcaccacagttatcaggggagcaaacagggactaagtccac

SEQ ID NO: 766 - DNA, 72 bp, synthetic construct
  misc_feature 1..72: note = Synthetic: 5216_Human_quadMut_37T_46A_52A_62T_n1
  source 1..72: mol_type = other DNA
gggggaggctgctggtgaatattaaccaaggtcacctcagttatcagaggaacaaacagggtctaagtccac

SEQ ID NO: 767 - DNA, 72 bp, synthetic construct
  misc_feature 1..72: note = Synthetic: 5217_Human_quadMut_37T_46A_52T_72A_n1
  source 1..72: mol_type = other DNA
gggggaggctgctggtgaatattaaccaaggtcacctcagttatcagaggatcaaacaggggctaagtccaa

SEQ ID NO: 768 - DNA, 72 bp, synthetic construct
  misc_feature 1..72: note = Synthetic: 5219_Human_quadMut_37A_48G_52T_62C_n1
  source 1..72: mol_type = other DNA
gggggaggctgctggtgaatattaaccaaggtcaccacagttatcgggggatcaaacagggcctaagtccac

SEQ ID NO: 769 - DNA, 72 bp, synthetic construct
  misc_feature 1..72: note = Synthetic: 5222_Human_quadMut_37T_52A_62T_72A_n1
  source 1..72: mol_type = other DNA
gggggaggctgctggtgaatattaaccaaggtcacctcagttatcggaggaacaaacagggtctaagtccaa

SEQ ID NO: 770 - DNA, 72 bp, synthetic construct
  misc_feature 1..72: note = Synthetic: 5223_Human_quadMut_45G_46A_48G_52A_n1
  source 1..72: mol_type = other DNA
gggggaggctgctggtgaatattaaccaaggtcaccccagttatgaggggaacaaacaggggctaagtccac

SEQ ID NO: 771 - DNA, 72 bp, synthetic construct
  misc_feature 1..72: note = Synthetic: 5224_Human_quadMut_45T_46T_48T_62C_n1
  source 1..72: mol_type = other DNA
gggggaggctgctggtgaatattaaccaaggtcaccccagttatttgtggagcaaacagggcctaagtccac

SEQ ID NO: 772 - DNA, 72 bp, synthetic construct
  misc_feature 1..72: note = Synthetic: 5228_Human_quadMut_45G_46A_62T_72A_n1
  source 1..72: mol_type = other DNA
gggggaggctgctggtgaatattaaccaaggtcaccccagttatgagaggagcaaacagggtctaagtccaa

SEQ ID NO: 773 - DNA, 72 bp, synthetic construct
  misc_feature 1..72: note = Synthetic: 5230_Human_quadMut_45A_48G_52T_72A_n1
  source 1..72: mol_type = other DNA
gggggaggctgctggtgaatattaaccaaggtcaccccagttatagggggatcaaacaggggctaagtccaa

SEQ ID NO: 774 - DNA, 72 bp, synthetic construct
  misc_feature 1..72: note = Synthetic: 5232_Human_quadMut_45G_52T_62C_72T_n1
  source 1..72: mol_type = other DNA
gggggaggctgctggtgaatattaaccaaggtcaccccagttatgggaggatcaaacagggcctaagtccat

SEQ ID NO: 775 - DNA, 72 bp, synthetic construct
  misc_feature 1..72: note = Synthetic: 5233_Human_quadMut_46A_48G_52C_62T_n1
  source 1..72: mol_type = other DNA
gggggaggctgctggtgaatattaaccaaggtcaccccagttatcaggggaccaaacagggtctaagtccac

SEQ ID NO: 776 - DNA, 72 bp, synthetic construct
  misc_feature 1..72: note = Synthetic: 5235_Human_quadMut_46T_48G_62A_72T_n1
  source 1..72: mol_type = other DNA
gggggaggctgctggtgaatattaaccaaggtcaccccagttatctggggagcaaacagggactaagtccat

SEQ ID NO: 777 - DNA, 72 bp, synthetic construct
  misc_feature 1..72: note = Synthetic: 5240_Human_quadMut_1T_3A_8A_46T_n1
  source 1..72: mol_type = other DNA
tgaggagactgctggtgaatattaaccaaggtcaccccagttatctgaggagcaaacaggggctaagtccac

SEQ ID NO: 778 - DNA, 72 bp, synthetic construct
  misc_feature 1..72: note = Synthetic: 5241_Human_quadMut_1A_3A_8T_48T_n1
  source 1..72: mol_type = other DNA
agaggagtctgctggtgaatattaaccaaggtcaccccagttatcggtggagcaaacaggggctaagtccac

SEQ ID NO: 779 - DNA, 72 bp, synthetic construct
  misc_feature 1..72: note = Synthetic: 5242_Human_quadMut_1A_3A_8A_52T_n1
  source 1..72: mol_type = other DNA
agaggagactgctggtgaatattaaccaaggtcaccccagttatcggaggatcaaacaggggctaagtccac

SEQ ID NO: 780 - DNA, 72 bp, synthetic construct
  misc_feature 1..72: note = Synthetic: 5243_Human_quadMut_1A_3A_8C_62C_n1
  source 1..72: mol_type = other DNA
agaggagcctgctggtgaatattaaccaaggtcaccccagttatcggaggagcaaacagggcctaagtccac

SEQ ID NO: 781 - DNA, 72 bp, synthetic construct
  misc_feature 1..72: note = Synthetic: 5245_Human_quadMut_1A_3T_14A_35G_n1
  source 1..72: mol_type = other DNA
agtggaggctgctagtgaatattaaccaaggtcagcccagttatcggaggagcaaacaggggctaagtccac

SEQ ID NO: 782 - DNA, 72 bp, synthetic construct
  misc_feature 1..72: note = Synthetic: 5248_Human_quadMut_1T_3A_14A_46T_n1
  source 1..72: mol_type = other DNA
tgaggaggctgctagtgaatattaaccaaggtcaccccagttatctgaggagcaaacaggggctaagtccac

SEQ ID NO: 783 - DNA, 72 bp, synthetic construct
  misc_feature 1..72: note = Synthetic: 5252_Human_quadMut_1A_3T_14A_72A_n1
  source 1..72: mol_type = other DNA
agtggaggctgctagtgaatattaaccaaggtcaccccagttatcggaggagcaaacaggggctaagtccaa

SEQ ID NO: 784 - DNA, 72 bp, synthetic construct
  misc_feature 1..72: note = Synthetic: 5260_Human_quadMut_1A_3A_37A_46A_n1
  source 1..72: mol_type = other DNA
agaggaggctgctggtgaatattaaccaaggtcaccacagttatcagaggagcaaacaggggctaagtccac

SEQ ID NO: 785 - DNA, 72 bp, synthetic construct
  misc_feature 1..72: note = Synthetic: 5262_Human_quadMut_1A_3T_37A_62C_n1
  source 1..72: mol_type = other DNA
agtggaggctgctggtgaatattaaccaaggtcaccacagttatcggaggagcaaacagggcctaagtccac

SEQ ID NO: 786 - DNA, 72 bp, synthetic construct
  misc_feature 1..72: note = Synthetic: 5263_Human_quadMut_1A_3T_37T_72A_n1
  source 1..72: mol_type = other DNA
agtggaggctgctggtgaatattaaccaaggtcacctcagttatcggaggagcaaacaggggctaagtccaa

SEQ ID NO: 787 - DNA, 72 bp, synthetic construct
  misc_feature 1..72: note = Synthetic: 5269_Human_quadMut_1T_3A_46A_52A_n1
  source 1..72: mol_type = other DNA
tgaggaggctgctggtgaatattaaccaaggtcaccccagttatcagaggaacaaacaggggctaagtccac

SEQ ID NO: 788 - DNA, 72 bp, synthetic construct
  misc_feature 1..72: note = Synthetic: 5271_Human_quadMut_1A_3T_46T_72A_n1
  source 1..72: mol_type = other DNA
agtggaggctgctggtgaatattaaccaaggtcaccccagttatctgaggagcaaacaggggctaagtccaa

SEQ ID NO: 789 - DNA, 72 bp, synthetic construct
  misc_feature 1..72: note = Synthetic: 5274_Human_quadMut_1A_3A_48G_72A_n1
  source 1..72: mol_type = other DNA
agaggaggctgctggtgaatattaaccaaggtcaccccagttatcgggggagcaaacaggggctaagtccaa

SEQ ID NO: 790 - DNA, 72 bp, synthetic construct
  misc_feature 1..72: note = Synthetic: 5275_Human_quadMut_1T_3A_52T_62C_n1
  source 1..72: mol_type = other DNA
tgaggaggctgctggtgaatattaaccaaggtcaccccagttatcggaggatcaaacagggcctaagtccac

SEQ ID NO: 791 - DNA, 72 bp, synthetic construct
  misc_feature 1..72: note = Synthetic: 5283_Human_quadMut_1A_8C_14A_52A_n1
  source 1..72: mol_type = other DNA
aggggagcctgctagtgaatattaaccaaggtcaccccagttatcggaggaacaaacaggggctaagtccac

SEQ ID NO: 792 - DNA, 72 bp, synthetic construct
  misc_feature 1..72: note = Synthetic: 5286_Human_quadMut_1A_8A_35G_37A_n1
  source 1..72: mol_type = other DNA
aggggagactgctggtgaatattaaccaaggtcagcacagttatcggaggagcaaacaggggctaagtccac

SEQ ID NO: 793 - DNA, 72 bp, synthetic construct
  misc_feature 1..72: note = Synthetic: 5287_Human_quadMut_1T_8T_35A_45G_n1
  source 1..72: mol_type = other DNA
tggggagtctgctggtgaatattaaccaaggtcaacccagttatgggaggagcaaacaggggctaagtccac

SEQ ID NO: 794 - DNA, 72 bp, synthetic construct
  misc_feature 1..72: note = Synthetic: 5289_Human_quadMut_1A_8C_35A_48T_n1
  source 1..72: mol_type = other DNA
aggggagcctgctggtgaatattaaccaaggtcaacccagttatcggtggagcaaacaggggctaagtccac

SEQ ID NO: 795 - DNA, 72 bp, synthetic construct
  misc_feature 1..72: note = Synthetic: 5296_Human_quadMut_1A_8C_37T_62C_n1
  source 1..72: mol_type = other DNA
aggggagcctgctggtgaatattaaccaaggtcacctcagttatcggaggagcaaacagggcctaagtccac

SEQ ID NO: 796 - DNA, 72 bp, synthetic construct
  misc_feature 1..72: note = Synthetic: 5304_Human_quadMut_1A_8A_46A_52T_n1
  source 1..72: mol_type = other DNA
aggggagactgctggtgaatattaaccaaggtcaccccagttatcagaggatcaaacaggggctaagtccac

SEQ ID NO: 797 - DNA, 72 bp, synthetic construct
  misc_feature 1..72: note = Synthetic: 5313_Human_quadMut_1T_14T_35T_37T_n1
  source 1..72: mol_type = other DNA
tggggaggctgcttgtgaatattaaccaaggtcatctcagttatcggaggagcaaacaggggctaagtccac

SEQ ID NO: 798 - DNA, 72 bp, synthetic construct
  misc_feature 1..72: note = Synthetic: 5322_Human_quadMut_1A_14A_37A_52T_n1
  source 1..72: mol_type = other DNA
aggggaggctgctagtgaatattaaccaaggtcaccacagttatcggaggatcaaacaggggctaagtccac

SEQ ID NO: 799 - DNA, 72 bp, synthetic construct
  misc_feature 1..72: note = Synthetic: 5324_Human_quadMut_1A_14A_37T_72T_n1
  source 1..72: mol_type = other DNA
aggggaggctgctagtgaatattaaccaaggtcacctcagttatcggaggagcaaacaggggctaagtccat

SEQ ID NO: 800 - DNA, 72 bp, synthetic construct
  misc_feature 1..72: note = Synthetic: 5331_Human_quadMut_1T_14T_46T_52T_n1
  source 1..72: mol_type = other DNA
tggggaggctgcttgtgaatattaaccaaggtcaccccagttatctgaggatcaaacaggggctaagtccac

SEQ ID NO: 801 - DNA, 72 bp, synthetic construct
  misc_feature 1..72: note = Synthetic: 5332_Human_quadMut_1A_14A_46A_62C_n1
  source 1..72: mol_type = other DNA
aggggaggctgctagtgaatattaaccaaggtcaccccagttatcagaggagcaaacagggcctaagtccac

SEQ ID NO: 802 - DNA, 72 bp, synthetic construct
  misc_feature 1..72: note = Synthetic: 5335_Human_quadMut_1T_14T_52A_62A_n1
  source 1..72: mol_type = other DNA
tggggaggctgcttgtgaatattaaccaaggtcaccccagttatcggaggaacaaacagggactaagtccac

SEQ ID NO: 803 - DNA, 72 bp, synthetic construct
  misc_feature 1..72: note = Synthetic: 5338_Human_quadMut_1T_35G_37A_45T_n1
  source 1..72: mol_type = other DNA
tggggaggctgctggtgaatattaaccaaggtcagcacagttattggaggagcaaacaggggctaagtccac

SEQ ID NO: 804 - DNA, 72 bp, synthetic construct
  misc_feature 1..72: note = Synthetic: 5339_Human_quadMut_1A_35T_37T_46T_n1
  source 1..72: mol_type = other DNA
aggggaggctgctggtgaatattaaccaaggtcatctcagttatctgaggagcaaacaggggctaagtccac

SEQ ID NO: 805 - DNA, 72 bp, synthetic construct
  misc_feature 1..72: note = Synthetic: 5342_Human_quadMut_1A_35G_37T_62C_n1
  source 1..72: mol_type = other DNA
aggggaggctgctggtgaatattaaccaaggtcagctcagttatcggaggagcaaacagggcctaagtccac

SEQ ID NO: 806 - DNA, 72 bp, synthetic construct
  misc_feature 1..72: note = Synthetic: 5348_Human_quadMut_1T_35G_46T_48T_n1
  source 1..72: mol_type = other DNA
tggggaggctgctggtgaatattaaccaaggtcagcccagttatctgtggagcaaacaggggctaagtccac

SEQ ID NO: 807 - DNA, 72 bp, synthetic construct
  misc_feature 1..72: note = Synthetic: 5349_Human_quadMut_1A_35G_46A_52T_n1
  source 1..72: mol_type = other DNA
aggggaggctgctggtgaatattaaccaaggtcagcccagttatcagaggatcaaacaggggctaagtccac

SEQ ID NO: 808 - DNA, 72 bp, synthetic construct
  misc_feature 1..72: note = Synthetic: 5350_Human_quadMut_1T_35G_46A_72T_n1
  source 1..72: mol_type = other DNA
tggggaggctgctggtgaatattaaccaaggtcagcccagttatcagaggagcaaacaggggctaagtccat

SEQ ID NO: 809 - DNA, 72 bp, synthetic construct
  misc_feature 1..72: note = Synthetic: 5353_Human_quadMut_1T_35G_48G_72T_n1
  source 1..72: mol_type = other DNA
tggggaggctgctggtgaatattaaccaaggtcagcccagttatcgggggagcaaacaggggctaagtccat

SEQ ID NO: 810 - DNA, 72 bp, synthetic construct
  misc_feature 1..72: note = Synthetic: 5354_Human_quadMut_1A_35A_52C_62C_n1
  source 1..72: mol_type = other DNA
aggggaggctgctggtgaatattaaccaaggtcaacccagttatcggaggaccaaacagggcctaagtccac

SEQ ID NO: 811 - DNA, 72 bp, synthetic construct
  misc_feature 1..72: note = Synthetic: 5356_Human_quadMut_1A_35T_62C_72A_n1
  source 1..72: mol_type = other DNA
aggggaggctgctggtgaatattaaccaaggtcatcccagttatcggaggagcaaacagggcctaagtccaa

SEQ ID NO: 812 - DNA, 72 bp, synthetic construct
  misc_feature 1..72: note = Synthetic: 5358_Human_quadMut_1A_37A_45A_52T_n1
  source 1..72: mol_type = other DNA
aggggaggctgctggtgaatattaaccaaggtcaccacagttataggaggatcaaacaggggctaagtccac

SEQ ID NO: 813 - DNA, 72 bp, synthetic construct
  misc_feature 1..72: note = Synthetic: 5361_Human_quadMut_1A_37A_46T_48T_n1
  source 1..72: mol_type = other DNA
aggggaggctgctggtgaatattaaccaaggtcaccacagttatctgtggagcaaacaggggctaagtccac

SEQ ID NO: 814 - DNA, 72 bp, synthetic construct
  misc_feature 1..72: note = Synthetic: 5362_Human_quadMut_1T_37T_46T_52A_n1
  source 1..72: mol_type = other DNA
tggggaggctgctggtgaatattaaccaaggtcacctcagttatctgaggaacaaacaggggctaagtccac

SEQ ID NO: 815 - DNA, 72 bp, synthetic construct
  misc_feature 1..72: note = Synthetic: 5372_Human_quadMut_1A_45G_46A_52A_n1
  source 1..72: mol_type = other DNA
aggggaggctgctggtgaatattaaccaaggtcaccccagttatgagaggaacaaacaggggctaagtccac

SEQ ID NO: 816 - DNA, 72 bp, synthetic construct
  misc_feature 1..72: note = Synthetic: 5377_Human_quadMut_1A_45G_48G_72T_n1
  source 1..72: mol_type = other DNA
aggggaggctgctggtgaatattaaccaaggtcaccccagttatggggggagcaaacaggggctaagtccat

SEQ ID NO: 817 - DNA, 72 bp, synthetic construct
  misc_feature 1..72: note = Synthetic: 5378_Human_quadMut_1T_45A_52A_62T_n1
  source 1..72: mol_type = other DNA
tggggaggctgctggtgaatattaaccaaggtcaccccagttataggaggaacaaacagggtctaagtccac

SEQ ID NO: 818 - DNA, 72 bp, synthetic construct
  misc_feature 1..72: note = Synthetic: 5381_Human_quadMut_1A_46A_48G_62T_n1
  source 1..72: mol_type = other DNA
aggggaggctgctggtgaatattaaccaaggtcaccccagttatcaggggagcaaacagggtctaagtccac

SEQ ID NO: 819 - DNA, 72 bp, synthetic construct
  misc_feature 1..72: note = Synthetic: 5382_Human_quadMut_1A_46A_48G_72A_n1
  source 1..72: mol_type = other DNA
aggggaggctgctggtgaatattaaccaaggtcaccccagttatcaggggagcaaacaggggctaagtccaa

SEQ ID NO: 820 - DNA, 72 bp, synthetic construct
  misc_feature 1..72: note = Synthetic: 5384_Human_quadMut_1T_46T_52T_72A_n1
  source 1..72: mol_type = other DNA
tggggaggctgctggtgaatattaaccaaggtcaccccagttatctgaggatcaaacaggggctaagtccaa

SEQ ID NO: 821 - DNA, 72 bp, synthetic construct
  misc_feature 1..72: note = Synthetic: 5386_Human_quadMut_1A_48G_52T_62C_n1
  source 1..72: mol_type = other DNA
aggggaggctgctggtgaatattaaccaaggtcaccccagttatcgggggatcaaacagggcctaagtccac

SEQ ID NO: 822 - DNA, 72 bp, synthetic construct
  misc_feature 1..72: note = Synthetic: 5388_Human_quadMut_1A_48G_62C_72T_n1
  source 1..72: mol_type = other DNA
aggggaggctgctggtgaatattaaccaaggtcaccccagttatcgggggagcaaacagggcctaagtccat

SEQ ID NO: 823 - DNA, 72 bp, synthetic construct
  misc_feature 1..72: note = Synthetic: 5392_Human_quadMut_3A_8A_14T_45G_n1
  source 1..72: mol_type = other DNA
ggaggagactgcttgtgaatattaaccaaggtcaccccagttatgggaggagcaaacaggggctaagtccac

SEQ ID NO: 824 - DNA, 72 bp, synthetic construct
  misc_feature 1..72: note = Synthetic: 5398_Human_quadMut_3A_8A_35T_37T_n1
  source 1..72: mol_type = other DNA
ggaggagactgctggtgaatattaaccaaggtcatctcagttatcggaggagcaaacaggggctaagtccac

SEQ ID NO: 825 - DNA, 72 bp, synthetic construct
  misc_feature 1..72: note = Synthetic: 5406_Human_quadMut_3A_8C_37T_46A_n1
  source 1..72: mol_type = other DNA
ggaggagcctgctggtgaatattaaccaaggtcacctcagttatcagaggagcaaacaggggctaagtccac

SEQ ID NO: 826 - DNA, 72 bp, synthetic construct
  misc_feature 1..72: note = Synthetic: 5407_Human_quadMut_3T_8C_37T_48G_n1
  source 1..72: mol_type = other DNA
ggtggagcctgctggtgaatattaaccaaggtcacctcagttatcgggggagcaaacaggggctaagtccac

SEQ ID NO: 827 - DNA, 72 bp, synthetic construct
  misc_feature 1..72: note = Synthetic: 5408_Human_quadMut_3T_8A_37T_52T_n1
  source 1..72: mol_type = other DNA
ggtggagactgctggtgaatattaaccaaggtcacctcagttatcggaggatcaaacaggggctaagtccac

SEQ ID NO: 828 - DNA, 72 bp, synthetic construct
  misc_feature 1..72: note = Synthetic: 5409_Human_quadMut_3T_8T_37A_62A_n1
  source 1..72: mol_type = other DNA
ggtggagtctgctggtgaatattaaccaaggtcaccacagttatcggaggagcaaacagggactaagtccac

SEQ ID NO: 829 - DNA, 72 bp, synthetic construct
  misc_feature 1..72: note = Synthetic: 5423_Human_quadMut_3A_8A_52T_62A_n1
  source 1..72: mol_type = other DNA
ggaggagactgctggtgaatattaaccaaggtcaccccagttatcggaggatcaaacagggactaagtccac

SEQ ID NO: 830 - DNA, 72 bp, synthetic construct
  misc_feature 1..72: note = Synthetic: 5424_Human_quadMut_3A_8A_52T_72G_n1
  source 1..72: mol_type = other DNA
ggaggagactgctggtgaatattaaccaaggtcaccccagttatcggaggatcaaacaggggctaagtccag

SEQ ID NO: 831 - DNA, 72 bp, synthetic construct
  misc_feature 1..72: note = Synthetic: 5425_Human_quadMut_3A_8T_62T_72A_n1
  source 1..72: mol_type = other DNA
ggaggagtctgctggtgaatattaaccaaggtcaccccagttatcggaggagcaaacagggtctaagtccaa

SEQ ID NO: 832 - DNA, 72 bp, synthetic construct
  misc_feature 1..72: note = Synthetic: 5430_Human_quadMut_3A_14T_35G_52T_n1
  source 1..72: mol_type = other DNA
ggaggaggctgcttgtgaatattaaccaaggtcagcccagttatcggaggatcaaacaggggctaagtccac

SEQ ID NO: 833 - DNA, 72 bp, synthetic construct
  misc_feature 1..72: note = Synthetic: 5435_Human_quadMut_3T_14T_37A_48G_n1
  source 1..72: mol_type = other DNA
ggtggaggctgcttgtgaatattaaccaaggtcaccacagttatcgggggagcaaacaggggctaagtccac

SEQ ID NO: 834 - DNA, 72 bp, synthetic construct
  misc_feature 1..72: note = Synthetic: 5436_Human_quadMut_3A_14A_37T_52T_n1
  source 1..72: mol_type = other DNA
ggaggaggctgctagtgaatattaaccaaggtcacctcagttatcggaggatcaaacaggggctaagtccac

SEQ ID NO: 835 - DNA, 72 bp, synthetic construct
  misc_feature 1..72: note = Synthetic: 5443_Human_quadMut_3T_14A_45T_72A_n1
  source 1..72: mol_type = other DNA
ggtggaggctgctagtgaatattaaccaaggtcaccccagttattggaggagcaaacaggggctaagtccaa

SEQ ID NO: 836 - DNA, 72 bp, synthetic construct
  misc_feature 1..72: note = Synthetic: 5444_Human_quadMut_3A_14A_46A_48T_n1
  source 1..72: mol_type = other DNA
ggaggaggctgctagtgaatattaaccaaggtcaccccagttatcagtggagcaaacaggggctaagtccac

SEQ ID NO: 837 - DNA, 72 bp, synthetic construct
  misc_feature 1..72: note = Synthetic: 5447_Human_quadMut_3A_14A_46A_72A_n1
  source 1..72: mol_type = other DNA
ggaggaggctgctagtgaatattaaccaaggtcaccccagttatcagaggagcaaacaggggctaagtccaa

SEQ ID NO: 838 - DNA, 72 bp, synthetic construct
  misc_feature 1..72: note = Synthetic: 5450_Human_quadMut_3A_14T_48T_72G_n1
  source 1..72: mol_type = other DNA
ggaggaggctgcttgtgaatattaaccaaggtcaccccagttatcggtggagcaaacaggggctaagtccag

SEQ ID NO: 839 - DNA, 72 bp, synthetic construct
  misc_feature 1..72: note = Synthetic: 5451_Human_quadMut_3A_14A_52A_62C_n1
  source 1..72: mol_type = other DNA
ggaggaggctgctagtgaatattaaccaaggtcaccccagttatcggaggaacaaacagggcctaagtccac

SEQ ID NO: 840 - DNA, 72 bp, synthetic construct
  misc_feature 1..72: note = Synthetic: 5455_Human_quadMut_3A_35A_37A_46A_n1
  source 1..72: mol_type = other DNA
ggaggaggctgctggtgaatattaaccaaggtcaacacagttatcagaggagcaaacaggggctaagtccac

SEQ ID NO: 841 - DNA, 72 bp, synthetic construct
  misc_feature 1..72: note = Synthetic: 5456_Human_quadMut_3A_35A_37A_48G_n1
  source 1..72: mol_type = other DNA
ggaggaggctgctggtgaatattaaccaaggtcaacacagttatcgggggagcaaacaggggctaagtccac

SEQ ID NO: 842 - DNA, 72 bp, synthetic construct
  misc_feature 1..72: note = Synthetic: 5457_Human_quadMut_3T_35T_37T_52C_n1
  source 1..72: mol_type = other DNA
ggtggaggctgctggtgaatattaaccaaggtcatctcagttatcggaggaccaaacaggggctaagtccac

SEQ ID NO: 843 - DNA, 72 bp, synthetic construct
  misc_feature 1..72: note = Synthetic: 5465_Human_quadMut_3T_35T_46A_48G_n1
  source 1..72: mol_type = other DNA
ggtggaggctgctggtgaatattaaccaaggtcatcccagttatcaggggagcaaacaggggctaagtccac

SEQ ID NO: 844 - DNA, 72 bp, synthetic construct
  misc_feature 1..72: note = Synthetic: 5467_Human_quadMut_3T_35A_46A_62C_n1
  source 1..72: mol_type = other DNA
ggtggaggctgctggtgaatattaaccaaggtcaacccagttatcagaggagcaaacagggcctaagtccac

SEQ ID NO: 845 - DNA, 72 bp, synthetic construct
  misc_feature 1..72: note = Synthetic: 5468_Human_quadMut_3A_35A_46T_72T_n1
  source 1..72: mol_type = other DNA
ggaggaggctgctggtgaatattaaccaaggtcaacccagttatctgaggagcaaacaggggctaagtccat

SEQ ID NO: 846 - DNA, 72 bp, synthetic construct
  misc_feature 1..72: note = Synthetic: 5481_Human_quadMut_3T_37T_46T_52T_n1
  source 1..72: mol_type = other DNA
ggtggaggctgctggtgaatattaaccaaggtcacctcagttatctgaggatcaaacaggggctaagtccac

SEQ ID NO: 847 - DNA, 72 bp, synthetic construct
  misc_feature 1..72: note = Synthetic: 5482_Human_quadMut_3T_37T_46A_62T_n1
  source 1..72: mol_type = other DNA
ggtggaggctgctggtgaatattaaccaaggtcacctcagttatcagaggagcaaacagggtctaagtccac

SEQ ID NO: 848 - DNA, 72 bp, synthetic construct
  misc_feature 1..72: note = Synthetic: 5485_Human_quadMut_3A_37A_48G_62C_n1
  source 1..72: mol_type = other DNA
ggaggaggctgctggtgaatattaaccaaggtcaccacagttatcgggggagcaaacagggcctaagtccac

SEQ ID NO: 849 - DNA, 72 bp, synthetic construct
  misc_feature 1..72: note = Synthetic: 5487_Human_quadMut_3T_37A_52T_62C_n1
  source 1..72: mol_type = other DNA
ggtggaggctgctggtgaatattaaccaaggtcaccacagttatcggaggatcaaacagggcctaagtccac

SEQ ID NO: 850 - DNA, 72 bp, synthetic construct
  misc_feature 1..72: note = Synthetic: 5488_Human_quadMut_3A_37A_52C_72A_n1
  source 1..72: mol_type = other DNA
ggaggaggctgctggtgaatattaaccaaggtcaccacagttatcggaggaccaaacaggggctaagtccaa

SEQ ID NO: 851 - DNA, 72 bp, synthetic construct
  misc_feature 1..72: note = Synthetic: 5491_Human_quadMut_3A_45G_46T_52C_n1
  source 1..72: mol_type = other DNA
ggaggaggctgctggtgaatattaaccaaggtcaccccagttatgtgaggaccaaacaggggctaagtccac

SEQ ID NO: 852 - DNA, 72 bp, synthetic construct
  misc_feature 1..72: note = Synthetic: 5492_Human_quadMut_3A_45A_46A_62T_n1
  source 1..72: mol_type = other DNA
ggaggaggctgctggtgaatattaaccaaggtcaccccagttataagaggagcaaacagggtctaagtccac

SEQ ID NO: 853 - DNA, 72 bp, synthetic construct
  misc_feature 1..72: note = Synthetic: 5500_Human_quadMut_3A_46T_48G_52T_n1
  source 1..72: mol_type = other DNA
ggaggaggctgctggtgaatattaaccaaggtcaccccagttatctggggatcaaacaggggctaagtccac

SEQ ID NO: 854 - DNA, 72 bp, synthetic construct
  misc_feature 1..72: note = Synthetic: 5503_Human_quadMut_3A_46A_52T_62C_n1
  source 1..72: mol_type = other DNA
ggaggaggctgctggtgaatattaaccaaggtcaccccagttatcagaggatcaaacagggcctaagtccac

SEQ ID NO: 855 - DNA, 72 bp, synthetic construct
  misc_feature 1..72: note = Synthetic: 5505_Human_quadMut_3A_46A_62C_72A_n1
  source 1..72: mol_type = other DNA
ggaggaggctgctggtgaatattaaccaaggtcaccccagttatcagaggagcaaacagggcctaagtccaa

SEQ ID NO: 856 - DNA, 72 bp, synthetic construct
  misc_feature 1..72: note = Synthetic: 5509_Human_quadMut_8A_14A_35A_37T_n1
  source 1..72: mol_type = other DNA
gggggagactgctagtgaatattaaccaaggtcaactcagttatcggaggagcaaacaggggctaagtccac

SEQ ID NO: 857 - DNA, 72 bp, synthetic construct
  misc_feature 1..72: note = Synthetic: 5513_Human_quadMut_8C_14T_35A_62T_n1
  source 1..72: mol_type = other DNA
gggggagcctgcttgtgaatattaaccaaggtcaacccagttatcggaggagcaaacagggtctaagtccac

SEQ ID NO: 858 - DNA, 72 bp, synthetic construct
  misc_feature 1..72: note = Synthetic: 5517_Human_quadMut_8T_14T_37T_48G_n1
  source 1..72: mol_type = other DNA
gggggagtctgcttgtgaatattaaccaaggtcacctcagttatcgggggagcaaacaggggctaagtccac

SEQ ID NO: 859 - DNA, 72 bp, synthetic construct
  misc_feature 1..72: note = Synthetic: 5519_Human_quadMut_8A_14A_37A_62A_n1
  source 1..72: mol_type = other DNA
gggggagactgctagtgaatattaaccaaggtcaccacagttatcggaggagcaaacagggactaagtccac

SEQ ID NO: 860 - DNA, 72 bp, synthetic construct
  misc_feature 1..72: note = Synthetic: 5526_Human_quadMut_8C_14T_46A_48T_n1
  source 1..72: mol_type = other DNA
gggggagcctgcttgtgaatattaaccaaggtcaccccagttatcagtggagcaaacaggggctaagtccac

SEQ ID NO: 861 - DNA, 72 bp, synthetic construct
  misc_feature 1..72: note = Synthetic: 5527_Human_quadMut_8T_14T_46A_52T_n1
  source 1..72: mol_type = other DNA
gggggagtctgcttgtgaatattaaccaaggtcaccccagttatcagaggatcaaacaggggctaagtccac

SEQ ID NO: 862 - DNA, 72 bp, synthetic construct
  misc_feature 1..72: note = Synthetic: 5531_Human_quadMut_8C_14T_48T_62T_n1
  source 1..72: mol_type = other DNA
gggggagcctgcttgtgaatattaaccaaggtcaccccagttatcggtggagcaaacagggtctaagtccac

SEQ ID NO: 863 - DNA, 72 bp, synthetic construct
  misc_feature 1..72: note = Synthetic: 5532_Human_quadMut_8C_14T_48G_72A_n1
  source 1..72: mol_type = other DNA
gggggagcctgcttgtgaatattaaccaaggtcaccccagttatcgggggagcaaacaggggctaagtccaa

SEQ ID NO: 864 - DNA, 72 bp, synthetic construct
  misc_feature 1..72: note = Synthetic: 5533_Human_quadMut_8T_14T_52A_62C_n1
  source 1..72: mol_type = other DNA
gggggagtctgcttgtgaatattaaccaaggtcaccccagttatcggaggaacaaacagggcctaagtccac

SEQ ID NO: 865 - DNA, 72 bp, synthetic construct
  misc_feature 1..72: note = Synthetic: 5537_Human_quadMut_8A_35A_37A_46A_n1
  source 1..72: mol_type = other DNA
gggggagactgctggtgaatattaaccaaggtcaacacagttatcagaggagcaaacaggggctaagtccac

SEQ ID NO: 866 - DNA, 72 bp, synthetic construct
  misc_feature 1..72: note = Synthetic: 5540_Human_quadMut_8C_35T_37T_62A_n1
  source 1..72: mol_type = other DNA
gggggagcctgctggtgaatattaaccaaggtcatctcagttatcggaggagcaaacagggactaagtccac

SEQ ID NO: 867 - DNA, 72 bp, synthetic construct
  misc_feature 1..72: note = Synthetic: 5546_Human_quadMut_8C_35T_46A_48T_n1
  source 1..72: mol_type = other DNA
gggggagcctgctggtgaatattaaccaaggtcatcccagttatcagtggagcaaacaggggctaagtccac

SEQ ID NO: 868 - DNA, 72 bp, synthetic construct
  misc_feature 1..72: note = Synthetic: 5547_Human_quadMut_8C_35G_46A_52A_n1
  source 1..72: mol_type = other DNA
gggggagcctgctggtgaatattaaccaaggtcagcccagttatcagaggaacaaacaggggctaagtccac

SEQ ID NO: 869 - DNA, 72 bp, synthetic construct
  misc_feature 1..72: note = Synthetic: 5548_Human_quadMut_8T_35A_46A_62T_n1
  source 1..72: mol_type = other DNA
gggggagtctgctggtgaatattaaccaaggtcaacccagttatcagaggagcaaacagggtctaagtccac

SEQ ID NO: 870 - DNA, 72 bp, synthetic construct
  misc_feature 1..72: note = Synthetic: 5551_Human_quadMut_8C_35T_48G_62T_n1
  source 1..72: mol_type = other DNA
gggggagcctgctggtgaatattaaccaaggtcatcccagttatcgggggagcaaacagggtctaagtccac

SEQ ID NO: 871 - skipped

SEQ ID NO: 872 - DNA, 72 bp, synthetic construct
  misc_feature 1..72: note = Synthetic: 5553_Human_quadMut_8C_35A_52T_62A_n1
  source 1..72: mol_type = other DNA
gggggagcctgctggtgaatattaaccaaggtcaacccagttatcggaggatcaaacagggactaagtccac

SEQ ID NO: 873 - DNA, 72 bp, synthetic construct
  misc_feature 1..72: note = Synthetic: 5554_Human_quadMut_8A_35T_52A_72A_n1
  source 1..72: mol_type = other DNA
gggggagactgctggtgaatattaaccaaggtcatcccagttatcggaggaacaaacaggggctaagtccaa

SEQ ID NO: 874 - DNA, 72 bp, synthetic construct
  misc_feature 1..72: note = Synthetic: 5556_Human_quadMut_8A_37T_45T_46A_n1
  source 1..72: mol_type = other DNA
gggggagactgctggtgaatattaaccaaggtcacctcagttattagaggagcaaacaggggctaagtccac

SEQ ID NO: 875 - DNA, 72 bp, synthetic construct
  misc_feature 1..72: note = Synthetic: 5557_Human_quadMut_8C_37T_45G_48T_n1
  source 1..72: mol_type = other DNA
gggggagcctgctggtgaatattaaccaaggtcacctcagttatgggtggagcaaacaggggctaagtccac

SEQ ID NO: 876 - DNA, 72 bp, synthetic construct
  misc_feature 1..72: note = Synthetic: 5558_Human_quadMut_8A_37A_45G_52A_n1
  source 1..72: mol_type = other DNA
gggggagactgctggtgaatattaaccaaggtcaccacagttatgggaggaacaaacaggggctaagtccac

SEQ ID NO: 877 - DNA, 72 bp, synthetic construct
  misc_feature 1..72: note = Synthetic: 5561_Human_quadMut_8C_37A_46T_48G_n1
  source 1..72: mol_type = other DNA
gggggagcctgctggtgaatattaaccaaggtcaccacagttatctggggagcaaacaggggctaagtccac

SEQ ID NO: 878 - DNA, 72 bp, synthetic construct
  misc_feature 1..72: note = Synthetic: 5562_Human_quadMut_8C_37A_46T_52T_n1
  source 1..72: mol_type = other DNA
gggggagcctgctggtgaatattaaccaaggtcaccacagttatctgaggatcaaacaggggctaagtccac

SEQ ID NO: 879 - DNA, 72 bp, synthetic construct
  misc_feature 1..72: note = Synthetic: 5563_Human_quadMut_8C_37T_46A_62T_n1
  source 1..72: mol_type = other DNA
gggggagcctgctggtgaatattaaccaaggtcacctcagttatcagaggagcaaacagggtctaagtccac

SEQ ID NO: 880 - DNA, 72 bp, synthetic construct
  misc_feature 1..72: note = Synthetic: 5566_Human_quadMut_8T_37T_48G_62C_n1
  source 1..72: mol_type = other DNA
gggggagtctgctggtgaatattaaccaaggtcacctcagttatcgggggagcaaacagggcctaagtccac

SEQ ID NO: 881 - DNA, 72 bp, synthetic construct
  misc_feature 1..72: note = Synthetic: 5567_Human_quadMut_8A_37A_52A_62T_n1
  source 1..72: mol_type = other DNA
gggggagactgctggtgaatattaaccaaggtcaccacagttatcggaggaacaaacagggtctaagtccac

SEQ ID NO: 882 - DNA, 72 bp, synthetic construct
  misc_feature 1..72: note = Synthetic: 5568_Human_quadMut_8C_37T_52A_72A_n1
  source 1..72: mol_type = other DNA
gggggagcctgctggtgaatattaaccaaggtcacctcagttatcggaggaacaaacaggggctaagtccaa

SEQ ID NO: 883 - DNA, 72 bp, synthetic construct
  misc_feature 1..72: note = Synthetic: 5569_Human_quadMut_8A_37T_62T_72A_n1
  source 1..72: mol_type = other DNA
gggggagactgctggtgaatattaaccaaggtcacctcagttatcggaggagcaaacagggtctaagtccaa

SEQ ID NO: 884 - DNA, 72 bp, synthetic construct
  misc_feature 1..72: note = Synthetic: 5572_Human_quadMut_8T_45T_46T_72A_n1
  source 1..72: mol_type = other DNA
gggggagtctgctggtgaatattaaccaaggtcaccccagttatttgaggagcaaacaggggctaagtccaa

SEQ ID NO: 885 - DNA, 72 bp, synthetic construct
  misc_feature 1..72: note = Synthetic: 5573_Human_quadMut_8T_45G_48T_52A_n1
  source 1..72: mol_type = other DNA
gggggagtctgctggtgaatattaaccaaggtcaccccagttatgggtggaacaaacaggggctaagtccac

SEQ ID NO: 886 - DNA, 72 bp, synthetic construct
  misc_feature 1..72: note = Synthetic: 5576_Human_quadMut_8C_45T_52T_62A_n1
  source 1..72: mol_type = other DNA
gggggagcctgctggtgaatattaaccaaggtcaccccagttattggaggatcaaacagggactaagtccac

SEQ ID NO: 887 - DNA, 72 bp, synthetic construct
  misc_feature 1..72: note = Synthetic: 5580_Human_quadMut_8C_46T_48G_62T_n1
  source 1..72: mol_type = other DNA
gggggagcctgctggtgaatattaaccaaggtcaccccagttatctggggagcaaacagggtctaagtccac

SEQ ID NO: 888 - DNA, 72 bp, synthetic construct
  misc_feature 1..72: note = Synthetic: 5581_Human_quadMut_8A_46T_52C_62C_n1
  source 1..72: mol_type = other DNA
gggggagactgctggtgaatattaaccaaggtcaccccagttatctgaggaccaaacagggcctaagtccac

SEQ ID NO: 889 - DNA, 72 bp, synthetic construct
  misc_feature 1..72: note = Synthetic: 5584_Human_quadMut_8C_48G_52A_62T_n1
  source 1..72: mol_type = other DNA
gggggagcctgctggtgaatattaaccaaggtcaccccagttatcgggggaacaaacagggtctaagtccac

SEQ ID NO: 890 - DNA, 72 bp, synthetic construct
  misc_feature 1..72: note = Synthetic: 5590_Human_quadMut_14A_35T_37T_48G_n1
  source 1..72: mol_type = other DNA
gggggaggctgctagtgaatattaaccaaggtcatctcagttatcgggggagcaaacaggggctaagtccac

SEQ ID NO: 891 - DNA, 72 bp, synthetic construct
  misc_feature 1..72: note = Synthetic: 5592_Human_quadMut_14A_35G_37T_62T_n1
  source 1..72: mol_type = other DNA
gggggaggctgctagtgaatattaaccaaggtcagctcagttatcggaggagcaaacagggtctaagtccac

SEQ ID NO: 892 - DNA, 72 bp, synthetic construct
  misc_feature 1..72: note = Synthetic: 5594_Human_quadMut_14A_35G_45G_46T_n1
  source 1..72: mol_type = other DNA
gggggaggctgctagtgaatattaaccaaggtcagcccagttatgtgaggagcaaacaggggctaagtccac

SEQ ID NO: 893 - DNA, 72 bp, synthetic construct
  misc_feature 1..72: note = Synthetic: 5599_Human_quadMut_14A_35A_46A_48G_n1
  source 1..72: mol_type = other DNA
gggggaggctgctagtgaatattaaccaaggtcaacccagttatcaggggagcaaacaggggctaagtccac

SEQ ID NO: 894 - DNA, 72 bp, synthetic construct
  misc_feature 1..72: note = Synthetic: 5601_Human_quadMut_14A_35T_46T_62C_n1
  source 1..72: mol_type = other DNA
gggggaggctgctagtgaatattaaccaaggtcatcccagttatctgaggagcaaacagggcctaagtccac

SEQ ID NO: 895 - DNA, 72 bp, synthetic construct
  misc_feature 1..72: note = Synthetic: 5604_Human_quadMut_14A_35A_48G_62T_n1
  source 1..72: mol_type = other DNA
gggggaggctgctagtgaatattaaccaaggtcaacccagttatcgggggagcaaacagggtctaagtccac

SEQ ID NO: 896 - DNA, 72 bp, synthetic construct
  misc_feature 1..72: note = Synthetic: 5606_Human_quadMut_14T_35A_52A_62C_n1
  source 1..72: mol_type = other DNA
gggggaggctgcttgtgaatattaaccaaggtcaacccagttatcggaggaacaaacagggcctaagtccac

SEQ ID NO: 897 - DNA, 72 bp, synthetic construct
  misc_feature 1..72: note = Synthetic: 5608_Human_quadMut_14A_35A_62T_72T_n1
  source 1..72: mol_type = other DNA
gggggaggctgctagtgaatattaaccaaggtcaacccagttatcggaggagcaaacagggtctaagtccat

SEQ ID NO: 898 - DNA, 72 bp, synthetic construct
  misc_feature 1..72: note = Synthetic: 5618_Human_quadMut_14A_37T_52A_62T_n1
  source 1..72: mol_type = other DNA
gggggaggctgctagtgaatattaaccaaggtcacctcagttatcggaggaacaaacagggtctaagtccac

SEQ ID NO: 899 - DNA, 72 bp, synthetic construct
  misc_feature 1..72: note = Synthetic: 5633_Human_quadMut_14A_46T_48G_72T_n1
  source 1..72: mol_type = other DNA
gggggaggctgctagtgaatattaaccaaggtcaccccagttatctggggagcaaacaggggctaagtccat

SEQ ID NO: 900 - DNA, 72 bp, synthetic construct
  misc_feature 1..72: note = Synthetic: 5634_Human_quadMut_14A_46A_52C_62C_n1
  source 1..72: mol_type = other DNA
gggggaggctgctagtgaatattaaccaaggtcaccccagttatcagaggaccaaacagggcctaagtccac

SEQ ID NO: 901 - DNA, 72 bp, synthetic construct
  misc_feature 1..72: note = Synthetic: 5635_Human_quadMut_14A_46T_52T_72A_n1
  source 1..72: mol_type = other DNA
gggggaggctgctagtgaatattaaccaaggtcaccccagttatctgaggatcaaacaggggctaagtccaa

SEQ ID NO: 902 - DNA, 72 bp, synthetic construct
  misc_feature 1..72: note = Synthetic: 5640_Human_quadMut_35T_37T_45T_46A_n1
  source 1..72: mol_type = other DNA
gggggaggctgctggtgaatattaaccaaggtcatctcagttattagaggagcaaacaggggctaagtccac

SEQ ID NO: 903 - DNA, 72 bp, synthetic construct
  misc_feature 1..72: note = Synthetic: 5641_Human_quadMut_35T_37A_45A_48T_n1
  source 1..72: mol_type = other DNA
gggggaggctgctggtgaatattaaccaaggtcatcacagttataggtggagcaaacaggggctaagtccac

SEQ ID NO: 904 - DNA, 72 bp, synthetic construct
  misc_feature 1..72: note = Synthetic: 5642_Human_quadMut_35T_37T_45T_52T_n1
  source 1..72: mol_type = other DNA
gggggaggctgctggtgaatattaaccaaggtcatctcagttattggaggatcaaacaggggctaagtccac

SEQ ID NO: 905 - DNA, 72 bp, synthetic construct
  misc_feature 1..72: note = Synthetic: 5645_Human_quadMut_35A_37A_46T_48G_n1
  source 1..72: mol_type = other DNA
gggggaggctgctggtgaatattaaccaaggtcaacacagttatctggggagcaaacaggggctaagtccac

SEQ ID NO: 906 - DNA, 72 bp, synthetic construct
  misc_feature 1..72: note = Synthetic: 5646_Human_quadMut_35G_37A_46A_52C_n1
  source 1..72: mol_type = other DNA
gggggaggctgctggtgaatattaaccaaggtcagcacagttatcagaggaccaaacaggggctaagtccac

SEQ ID NO: 907 - DNA, 72 bp, synthetic construct
  misc_feature 1..72: note = Synthetic: 5647_Human_quadMut_35G_37T_46A_62T_n1
  source 1..72: mol_type = other DNA
gggggaggctgctggtgaatattaaccaaggtcagctcagttatcagaggagcaaacagggtctaagtccac

SEQ ID NO: 908 - DNA, 72 bp, synthetic construct
  misc_feature 1..72: note = Synthetic: 5648_Human_quadMut_35A_37A_46T_72G_n1
  source 1..72: mol_type = other DNA
gggggaggctgctggtgaatattaaccaaggtcaacacagttatctgaggagcaaacaggggctaagtccag

SEQ ID NO: 909 - DNA, 72 bp, synthetic construct
  misc_feature 1..72: note = Synthetic: 5649_Human_quadMut_35A_37A_48T_52T_n1
  source 1..72: mol_type = other DNA
gggggaggctgctggtgaatattaaccaaggtcaacacagttatcggtggatcaaacaggggctaagtccac

SEQ ID NO: 910 - DNA, 72 bp, synthetic construct
  misc_feature 1..72: note = Synthetic: 5652_Human_quadMut_35A_37A_52T_62A_n1
  source 1..72: mol_type = other DNA
gggggaggctgctggtgaatattaaccaaggtcaacacagttatcggaggatcaaacagggactaagtccac

SEQ ID NO: 911 - DNA, 72 bp, synthetic construct
  misc_feature 1..72: note = Synthetic: 5653_Human_quadMut_35A_37T_52T_72G_n1
  source 1..72: mol_type = other DNA
gggggaggctgctggtgaatattaaccaaggtcaactcagttatcggaggatcaaacaggggctaagtccag

SEQ ID NO: 912 - DNA, 72 bp, synthetic construct
  misc_feature 1..72: note = Synthetic: 5654_Human_quadMut_35T_37T_62T_72T_n1
  source 1..72: mol_type = other DNA
gggggaggctgctggtgaatattaaccaaggtcatctcagttatcggaggagcaaacagggtctaagtccat

SEQ ID NO: 913 - DNA, 72 bp, synthetic construct
  misc_feature 1..72: note = Synthetic: 5655_Human_quadMut_35A_45T_46T_48T_n1
  source 1..72: mol_type = other DNA
gggggaggctgctggtgaatattaaccaaggtcaacccagttatttgtggagcaaacaggggctaagtccac

SEQ ID NO: 914 - DNA, 72 bp, synthetic construct
  misc_feature 1..72: note = Synthetic: 5656_Human_quadMut_35A_45T_46T_52T_n1
  source 1..72: mol_type = other DNA
gggggaggctgctggtgaatattaaccaaggtcaacccagttatttgaggatcaaacaggggctaagtccac

SEQ ID NO: 915 - DNA, 72 bp, synthetic construct
  misc_feature 1..72: note = Synthetic: 5658_Human_quadMut_35G_45G_46A_72A_n1
  source 1..72: mol_type = other DNA
gggggaggctgctggtgaatattaaccaaggtcagcccagttatgagaggagcaaacaggggctaagtccaa

SEQ ID NO: 916 - DNA, 72 bp, synthetic construct
  misc_feature 1..72: note = Synthetic: 5660_Human_quadMut_35A_45A_48G_62T_n1
  source 1..72: mol_type = other DNA
gggggaggctgctggtgaatattaaccaaggtcaacccagttatagggggagcaaacagggtctaagtccac

SEQ ID NO: 917 - DNA, 72 bp, synthetic construct
  misc_feature 1..72: note = Synthetic: 5661_Human_quadMut_35T_45T_48T_72A_n1
  source 1..72: mol_type = other DNA
gggggaggctgctggtgaatattaaccaaggtcatcccagttattggtggagcaaacaggggctaagtccaa

SEQ ID NO: 918 - DNA, 72 bp, synthetic construct
  misc_feature 1..72: note = Synthetic: 5662_Human_quadMut_35G_45T_52A_62T_n1
  source 1..72: mol_type = other DNA
gggggaggctgctggtgaatattaaccaaggtcagcccagttattggaggaacaaacagggtctaagtccac

SEQ ID NO: 919 - DNA, 72 bp, synthetic construct
  misc_feature 1..72: note = Synthetic: 5665_Human_quadMut_35A_46A_48T_52A_n1
  source 1..72: mol_type = other DNA
gggggaggctgctggtgaatattaaccaaggtcaacccagttatcagtggaacaaacaggggctaagtccac

SEQ ID NO: 920 - DNA, 72 bp, synthetic construct
  misc_feature 1..72: note = Synthetic: 5666_Human_quadMut_35A_46A_48G_62C_n1
  source 1..72: mol_type = other DNA
gggggaggctgctggtgaatattaaccaaggtcaacccagttatcaggggagcaaacagggcctaagtccac

SEQ ID NO: 921 - DNA, 72 bp, synthetic construct
  misc_feature 1..72: note = Synthetic: 5668_Human_quadMut_35A_46A_52T_62T_n1
  source 1..72: mol_type = other DNA
gggggaggctgctggtgaatattaaccaaggtcaacccagttatcagaggatcaaacagggtctaagtccac

SEQ ID NO: 922 - DNA, 72 bp, synthetic construct
  misc_feature 1..72: note = Synthetic: 5669_Human_quadMut_35T_48G_52A_62T_n1
  source 1..72: mol_type = other DNA
gggggaggctgctggtgaatattaaccaaggtcatcccagttatcgggggaacaaacagggtctaagtccac

SEQ ID NO: 923 - DNA, 72 bp, synthetic construct
  misc_feature 1..72: note = Synthetic: 5670_Human_quadMut_35G_48G_52C_72G_n1
  source 1..72: mol_type = other DNA
gggggaggctgctggtgaatattaaccaaggtcagcccagttatcgggggaccaaacaggggctaagtccag

SEQ ID NO: 924 - DNA, 72 bp, synthetic construct
  misc_feature 1..72: note = Synthetic: 5672_Human_quadMut_35A_52C_62T_72G_n1
  source 1..72: mol_type = other DNA
gggggaggctgctggtgaatattaaccaaggtcaacccagttatcggaggaccaaacagggtctaagtccag

SEQ ID NO: 925 - DNA, 72 bp, synthetic construct
  misc_feature 1..72: note = Synthetic: 5674_Human_quadMut_37T_45G_46T_52A_n1
  source 1..72: mol_type = other DNA
gggggaggctgctggtgaatattaaccaaggtcacctcagttatgtgaggaacaaacaggggctaagtccac

SEQ ID NO: 926 - DNA, 72 bp, synthetic construct
  misc_feature 1..72: note = Synthetic: 5675_Human_quadMut_37A_45G_46A_62T_n1
  source 1..72: mol_type = other DNA
gggggaggctgctggtgaatattaaccaaggtcaccacagttatgagaggagcaaacagggtctaagtccac

SEQ ID NO: 927 - DNA, 72 bp, synthetic construct
  misc_feature 1..72: note = Synthetic: 5683_Human_quadMut_37T_46A_48G_52A_n1
  source 1..72: mol_type = other DNA
gggggaggctgctggtgaatattaaccaaggtcacctcagttatcaggggaacaaacaggggctaagtccac

SEQ ID NO: 928 - DNA, 72 bp, synthetic construct
  misc_feature 1..72: note = Synthetic: 5685_Human_quadMut_37A_46A_52C_62T_n1
  source 1..72: mol_type = other DNA
gggggaggctgctggtgaatattaaccaaggtcaccacagttatcagaggaccaaacagggtctaagtccac

SEQ ID NO: 929 - DNA, 72 bp, synthetic construct
  misc_feature 1..72: note = Synthetic: 5687_Human_quadMut_37T_46T_62T_72T_n1
  source 1..72: mol_type = other DNA
gggggaggctgctggtgaatattaaccaaggtcacctcagttatctgaggagcaaacagggtctaagtccat

SEQ ID NO: 930 - DNA, 72 bp, synthetic construct
  misc_feature 1..72: note = Synthetic: 5689_Human_quadMut_37T_48G_52T_72A_n1
  source 1..72: mol_type = other DNA
gggggaggctgctggtgaatattaaccaaggtcacctcagttatcgggggatcaaacaggggctaagtccaa

SEQ ID NO: 931 - DNA, 72 bp, synthetic construct
  misc_feature 1..72: note = Synthetic: 5690_Human_quadMut_37A_48G_62T_72A_n1
  source 1..72: mol_type = other DNA
gggggaggctgctggtgaatattaaccaaggtcaccacagttatcgggggagcaaacagggtctaagtccaa

SEQ ID NO: 932 - DNA, 72 bp, synthetic construct
  misc_feature 1..72: note = Synthetic: 5691_Human_quadMut_37T_52T_62A_72T_n1
  source 1..72: mol_type = other DNA
gggggaggctgctggtgaatattaaccaaggtcacctcagttatcggaggatcaaacagggactaagtccat

SEQ ID NO: 933 - DNA, 72 bp, synthetic construct
  misc_feature 1..72: note = Synthetic: 5695_Human_quadMut_45G_46A_52A_62C_n1
  source 1..72: mol_type = other DNA
gggggaggctgctggtgaatattaaccaaggtcaccccagttatgagaggaacaaacagggcctaagtccac

SEQ ID NO: 934 - DNA, 72 bp, synthetic construct
  misc_feature 1..72: note = Synthetic: 5696_Human_quadMut_45G_46A_52A_72G_n1
  source 1..72: mol_type = other DNA
gggggaggctgctggtgaatattaaccaaggtcaccccagttatgagaggaacaaacaggggctaagtccag

SEQ ID NO: 935 - DNA, 72 bp, synthetic construct
  misc_feature 1..72: note = Synthetic: 5702_Human_quadMut_46A_48G_52A_62A_n1
  source 1..72: mol_type = other DNA
gggggaggctgctggtgaatattaaccaaggtcaccccagttatcaggggaacaaacagggactaagtccac

SEQ ID NO: 936 - DNA, 72 bp, synthetic construct
  misc_feature 1..72: note = Synthetic: 5704_Human_quadMut_46T_48G_62T_72T_n1
  source 1..72: mol_type = other DNA
gggggaggctgctggtgaatattaaccaaggtcaccccagttatctggggagcaaacagggtctaagtccat

SEQ ID NO: 937 - DNA, 72 bp, synthetic construct
  misc_feature 1..72: note = Synthetic: 5705_Human_quadMut_46T_52C_62T_72A_n1
  source 1..72: mol_type = other DNA
gggggaggctgctggtgaatattaaccaaggtcaccccagttatctgaggaccaaacagggtctaagtccaa

SEQ ID NO: 938 - DNA, 72 bp, synthetic construct
  misc_feature 1..72: note = Synthetic: 5708_Human_quadMut_1T_3T_8T_37T_n1
  source 1..72: mol_type = other DNA
tgtggagtctgctggtgaatattaaccaaggtcacctcagttatcggaggagcaaacaggggctaagtccac

SEQ ID NO: 939 - DNA, 72 bp, synthetic construct
  misc_feature 1..72: note = Synthetic: 5712_Human_quadMut_1A_3T_8C_52A_n1
  source 1..72: mol_type = other DNA
agtggagcctgctggtgaatattaaccaaggtcaccccagttatcggaggaacaaacaggggctaagtccac

SEQ ID NO: 940 - DNA, 72 bp, synthetic construct
  misc_feature 1..72: note = Synthetic: 5724_Human_quadMut_1A_3A_35T_72A_n1
  source 1..72: mol_type = other DNA
agaggaggctgctggtgaatattaaccaaggtcatcccagttatcggaggagcaaacaggggctaagtccaa

SEQ ID NO: 941 - DNA, 72 bp, synthetic construct
  misc_feature 1..72: note = Synthetic: 5726_Human_quadMut_1T_3A_37A_48T_n1
  source 1..72: mol_type = other DNA
tgaggaggctgctggtgaatattaaccaaggtcaccacagttatcggtggagcaaacaggggctaagtccac

SEQ ID NO: 942 - DNA, 72 bp, synthetic construct
  misc_feature 1..72: note = Synthetic: 5728_Human_quadMut_1T_3A_37T_62C_n1
  source 1..72: mol_type = other DNA
tgaggaggctgctggtgaatattaaccaaggtcacctcagttatcggaggagcaaacagggcctaagtccac

SEQ ID NO: 943 - DNA, 72 bp, synthetic construct
  misc_feature 1..72: note = Synthetic: 5730_Human_quadMut_1A_3A_45T_46T_n1
  source 1..72: mol_type = other DNA
agaggaggctgctggtgaatattaaccaaggtcaccccagttatttgaggagcaaacaggggctaagtccac

SEQ ID NO: 944 - DNA, 72 bp, synthetic construct
  misc_feature 1..72: note = Synthetic: 5733_Human_quadMut_1T_3A_45A_62T_n1
  source 1..72: mol_type = other DNA
tgaggaggctgctggtgaatattaaccaaggtcaccccagttataggaggagcaaacagggtctaagtccac

SEQ ID NO: 945 - DNA, 72 bp, synthetic construct
  misc_feature 1..72: note = Synthetic: 5736_Human_quadMut_1T_3T_46A_52A_n1
  source 1..72: mol_type = other DNA
tgtggaggctgctggtgaatattaaccaaggtcaccccagttatcagaggaacaaacaggggctaagtccac

SEQ ID NO: 946 - DNA, 72 bp, synthetic construct
  misc_feature 1..72: note = Synthetic: 5739_Human_quadMut_1T_3A_48T_52A_n1
  source 1..72: mol_type = other DNA
tgaggaggctgctggtgaatattaaccaaggtcaccccagttatcggtggaacaaacaggggctaagtccac

SEQ ID NO: 947 - DNA, 72 bp, synthetic construct
  misc_feature 1..72: note = Synthetic: 5740_Human_quadMut_1A_3T_48T_62T_n1
  source 1..72: mol_type = other DNA
agtggaggctgctggtgaatattaaccaaggtcaccccagttatcggtggagcaaacagggtctaagtccac

SEQ ID NO: 948 - DNA, 72 bp, synthetic construct
  misc_feature 1..72: note = Synthetic: 5743_Human_quadMut_1T_3T_52T_72G_n1
  source 1..72: mol_type = other DNA
tgtggaggctgctggtgaatattaaccaaggtcaccccagttatcggaggatcaaacaggggctaagtccag

SEQ ID NO: 949 - DNA, 72 bp, synthetic construct
  misc_feature 1..72: note = Synthetic: 5745_Human_quadMut_1A_8A_14T_37T_n1
  source 1..72: mol_type = other DNA
aggggagactgcttgtgaatattaaccaaggtcacctcagttatcggaggagcaaacaggggctaagtccac

SEQ ID NO: 950 - DNA, 72 bp, synthetic construct
  misc_feature 1..72: note = Synthetic: 5754_Human_quadMut_1T_8A_35T_52T_n1
  source 1..72: mol_type = other DNA
tggggagactgctggtgaatattaaccaaggtcatcccagttatcggaggatcaaacaggggctaagtccac

SEQ ID NO: 951 - DNA, 72 bp, synthetic construct
  misc_feature 1..72: note = Synthetic: 5759_Human_quadMut_1A_8A_37A_48T_n1
  source 1..72: mol_type = other DNA
aggggagactgctggtgaatattaaccaaggtcaccacagttatcggtggagcaaacaggggctaagtccac

SEQ ID NO: 952 - DNA, 72 bp, synthetic construct
  misc_feature 1..72: note = Synthetic: 5760_Human_quadMut_1A_8C_37T_52A_n1
  source 1..72: mol_type = other DNA
aggggagcctgctggtgaatattaaccaaggtcacctcagttatcggaggaacaaacaggggctaagtccac

SEQ ID NO: 953 - DNA, 72 bp, synthetic construct
  misc_feature 1..72: note = Synthetic: 5767_Human_quadMut_1A_8C_46T_48G_n1
  source 1..72: mol_type = other DNA
aggggagcctgctggtgaatattaaccaaggtcaccccagttatctggggagcaaacaggggctaagtccac

SEQ ID NO: 954 - DNA, 72 bp, synthetic construct
  misc_feature 1..72: note = Synthetic: 5772_Human_quadMut_1T_8T_48G_62A_n1
  source 1..72: mol_type = other DNA
tggggagtctgctggtgaatattaaccaaggtcaccccagttatcgggggagcaaacagggactaagtccac

SEQ ID NO: 955 - DNA, 72 bp, synthetic construct
  misc_feature 1..72: note = Synthetic: 5776_Human_quadMut_1A_8A_62T_72A_n1
  source 1..72: mol_type = other DNA
aggggagactgctggtgaatattaaccaaggtcaccccagttatcggaggagcaaacagggtctaagtccaa

SEQ ID NO: 956 - DNA, 72 bp, synthetic construct
  misc_feature 1..72: note = Synthetic: 5779_Human_quadMut_1A_14T_35T_46A_n1
  source 1..72: mol_type = other DNA
aggggaggctgcttgtgaatattaaccaaggtcatcccagttatcagaggagcaaacaggggctaagtccac

SEQ ID NO: 957 - DNA, 72 bp, synthetic construct
  misc_feature 1..72: note = Synthetic: 5781_Human_quadMut_1T_14A_35A_52A_n1
  source 1..72: mol_type = other DNA
tggggaggctgctagtgaatattaaccaaggtcaacccagttatcggaggaacaaacaggggctaagtccac

SEQ ID NO: 958 - DNA, 72 bp, synthetic construct
  misc_feature 1..72: note = Synthetic: 5787_Human_quadMut_1T_14A_37T_52T_n1
  source 1..72: mol_type = other DNA
tggggaggctgctagtgaatattaaccaaggtcacctcagttatcggaggatcaaacaggggctaagtccac

SEQ ID NO: 959 - DNA, 72 bp, synthetic construct
  misc_feature 1..72: note = Synthetic: 5791_Human_quadMut_1T_14A_45A_62T_n1
  source 1..72: mol_type = other DNA
tggggaggctgctagtgaatattaaccaaggtcaccccagttataggaggagcaaacagggtctaagtccac

SEQ ID NO: 960 - DNA, 72 bp, synthetic construct
  misc_feature 1..72: note = Synthetic: 5793_Human_quadMut_1T_14A_46T_48T_n1
  source 1..72: mol_type = other DNA
tggggaggctgctagtgaatattaaccaaggtcaccccagttatctgtggagcaaacaggggctaagtccac

SEQ ID NO: 961 - DNA, 72 bp, synthetic construct
  misc_feature 1..72: note = Synthetic: 5794_Human_quadMut_1T_14A_46A_52T_n1
  source 1..72: mol_type = other DNA
tggggaggctgctagtgaatattaaccaaggtcaccccagttatcagaggatcaaacaggggctaagtccac

SEQ ID NO: 962 - DNA, 72 bp, synthetic construct
  misc_feature 1..72: note = Synthetic: 5800_Human_quadMut_1T_14A_52T_62T_n1
  source 1..72: mol_type = other DNA
tggggaggctgctagtgaatattaaccaaggtcaccccagttatcggaggatcaaacagggtctaagtccac

SEQ ID NO: 963 - DNA, 72 bp, synthetic construct
  misc_feature 1..72: note = Synthetic: 5805_Human_quadMut_1T_35G_37T_48G_n1
  source 1..72: mol_type = other DNA
tggggaggctgctggtgaatattaaccaaggtcagctcagttatcgggggagcaaacaggggctaagtccac

SEQ ID NO: 964 - DNA, 72 bp, synthetic construct
  misc_feature 1..72: note = Synthetic: 5809_Human_quadMut_1A_35T_45T_46T_n1
  source 1..72: mol_type = other DNA
aggggaggctgctggtgaatattaaccaaggtcatcccagttatttgaggagcaaacaggggctaagtccac

SEQ ID NO: 965 - DNA, 72 bp, synthetic construct
  misc_feature 1..72: note = Synthetic: 5810_Human_quadMut_1A_35T_45G_48G_n1
  source 1..72: mol_type = other DNA
aggggaggctgctggtgaatattaaccaaggtcatcccagttatggggggagcaaacaggggctaagtccac

SEQ ID NO: 966 - DNA, 72 bp, synthetic construct
  misc_feature 1..72: note = Synthetic: 5814_Human_quadMut_1T_35A_46T_48T_n1
  source 1..72: mol_type = other DNA
tggggaggctgctggtgaatattaaccaaggtcaacccagttatctgtggagcaaacaggggctaagtccac

SEQ ID NO: 967 - DNA, 72 bp, synthetic construct
  misc_feature 1..72: note = Synthetic: 5815_Human_quadMut_1A_35T_46A_52C_n1
  source 1..72: mol_type = other DNA
aggggaggctgctggtgaatattaaccaaggtcatcccagttatcagaggaccaaacaggggctaagtccac

SEQ ID NO: 968 - DNA, 72 bp, synthetic construct
  misc_feature 1..72: note = Synthetic: 5816_Human_quadMut_1T_35A_46T_62T_n1
  source 1..72: mol_type = other DNA
tggggaggctgctggtgaatattaaccaaggtcaacccagttatctgaggagcaaacagggtctaagtccac

SEQ ID NO: 969 - DNA, 72 bp, synthetic construct
  misc_feature 1..72: note = Synthetic: 5817_Human_quadMut_1A_35A_46A_72T_n1
  source 1..72: mol_type = other DNA
aggggaggctgctggtgaatattaaccaaggtcaacccagttatcagaggagcaaacaggggctaagtccat

SEQ ID NO: 970 - DNA, 72 bp, synthetic construct
  misc_feature 1..72: note = Synthetic: 5821_Human_quadMut_1A_35G_52A_62T_n1
  source 1..72: mol_type = other DNA
aggggaggctgctggtgaatattaaccaaggtcagcccagttatcggaggaacaaacagggtctaagtccac

SEQ ID NO: 971 - DNA, 72 bp, synthetic construct
  misc_feature 1..72: note = Synthetic: 5823_Human_quadMut_1T_35T_62T_72G_n1
  source 1..72: mol_type = other DNA
tggggaggctgctggtgaatattaaccaaggtcatcccagttatcggaggagcaaacagggtctaagtccag

SEQ ID NO: 972 - DNA, 72 bp, synthetic construct
  misc_feature 1..72: note = Synthetic: 5824_Human_quadMut_1A_37A_45G_46A_n1
  source 1..72: mol_type = other DNA
aggggaggctgctggtgaatattaaccaaggtcaccacagttatgagaggagcaaacaggggctaagtccac

SEQ ID NO: 973 - DNA, 72 bp, synthetic construct
  misc_feature 1..72: note = Synthetic: 5827_Human_quadMut_1A_37T_45G_62C_n1
  source 1..72: mol_type = other DNA
aggggaggctgctggtgaatattaaccaaggtcacctcagttatgggaggagcaaacagggcctaagtccac

SEQ ID NO: 974 - DNA, 72 bp, synthetic construct
  misc_feature 1..72: note = Synthetic: 5828_Human_quadMut_1T_37T_45G_72A_n1
  source 1..72: mol_type = other DNA
tggggaggctgctggtgaatattaaccaaggtcacctcagttatgggaggagcaaacaggggctaagtccaa

SEQ ID NO: 975 - DNA, 72 bp, synthetic construct
  misc_feature 1..72: note = Synthetic: 5829_Human_quadMut_1A_37T_46A_52T_n1
  source 1..72: mol_type = other DNA
aggggaggctgctggtgaatattaaccaaggtcacctcagttatcagaggatcaaacaggggctaagtccac

SEQ ID NO: 976 - DNA, 72 bp, synthetic construct
  misc_feature 1..72: note = Synthetic: 5832_Human_quadMut_1A_37A_48T_52T_n1
  source 1..72: mol_type = other DNA
aggggaggctgctggtgaatattaaccaaggtcaccacagttatcggtggatcaaacaggggctaagtccac

SEQ ID NO: 977 - DNA, 72 bp, synthetic construct
  misc_feature 1..72: note = Synthetic: 5839_Human_quadMut_1A_45G_46T_52T_n1
  source 1..72: mol_type = other DNA
aggggaggctgctggtgaatattaaccaaggtcaccccagttatgtgaggatcaaacaggggctaagtccac

SEQ ID NO: 978 - DNA, 72 bp, synthetic construct
  misc_feature 1..72: note = Synthetic: 5840_Human_quadMut_1T_45A_46T_62C_n1
  source 1..72: mol_type = other DNA
tggggaggctgctggtgaatattaaccaaggtcaccccagttatatgaggagcaaacagggcctaagtccac

SEQ ID NO: 979 - DNA, 72 bp, synthetic construct
  misc_feature 1..72: note = Synthetic: 5848_Human_quadMut_1T_46T_48G_52C_n1
  source 1..72: mol_type = other DNA
tggggaggctgctggtgaatattaaccaaggtcaccccagttatctggggaccaaacaggggctaagtccac

SEQ ID NO: 980 - DNA, 72 bp, synthetic construct
  misc_feature 1..72: note = Synthetic: 5852_Human_quadMut_1T_46T_52T_72T_n1
  source 1..72: mol_type = other DNA
tggggaggctgctggtgaatattaaccaaggtcaccccagttatctgaggatcaaacaggggctaagtccat

SEQ ID NO: 981 - DNA, 72 bp, synthetic construct
  misc_feature 1..72: note = Synthetic: 5855_Human_quadMut_1A_48G_52T_72T_n1
  source 1..72: mol_type = other DNA
aggggaggctgctggtgaatattaaccaaggtcaccccagttatcgggggatcaaacaggggctaagtccat

SEQ ID NO: 982 - DNA, 72 bp, synthetic construct
  misc_feature 1..72: note = Synthetic: 5856_Human_quadMut_1T_48T_62C_72A_n1
  source 1..72: mol_type = other DNA
tggggaggctgctggtgaatattaaccaaggtcaccccagttatcggtggagcaaacagggcctaagtccaa

SEQ ID NO: 983 - DNA, 72 bp, synthetic construct
  misc_feature 1..72: note = Synthetic: 5866_Human_quadMut_3T_8A_35T_46A_n1
  source 1..72: mol_type = other DNA
ggtggagactgctggtgaatattaaccaaggtcatcccagttatcagaggagcaaacaggggctaagtccac

SEQ ID NO: 984 - DNA, 72 bp, synthetic construct
  misc_feature 1..72: note = Synthetic: 5867_Human_quadMut_3A_8A_35T_48T_n1
  source 1..72: mol_type = other DNA
ggaggagactgctggtgaatattaaccaaggtcatcccagttatcggtggagcaaacaggggctaagtccac

SEQ ID NO: 985 - DNA, 72 bp, synthetic construct
  misc_feature 1..72: note = Synthetic: 5868_Human_quadMut_3A_8A_35T_52T_n1
  source 1..72: mol_type = other DNA
ggaggagactgctggtgaatattaaccaaggtcatcccagttatcggaggatcaaacaggggctaagtccac

SEQ ID NO: 986 - DNA, 72 bp, synthetic construct
  misc_feature 1..72: note = Synthetic: 5869_Human_quadMut_3A_8A_35A_62T_n1
  source 1..72: mol_type = other DNA
ggaggagactgctggtgaatattaaccaaggtcaacccagttatcggaggagcaaacagggtctaagtccac

SEQ ID NO: 987 - DNA, 72 bp, synthetic construct
  misc_feature 1..72: note = Synthetic: 5880_Human_quadMut_3A_8T_45G_72A_n1
  source 1..72: mol_type = other DNA
ggaggagtctgctggtgaatattaaccaaggtcaccccagttatgggaggagcaaacaggggctaagtccaa

SEQ ID NO: 988 - DNA, 72 bp, synthetic construct
  misc_feature 1..72: note = Synthetic: 5882_Human_quadMut_3A_8A_46A_52A_n1
  source 1..72: mol_type = other DNA
ggaggagactgctggtgaatattaaccaaggtcaccccagttatcagaggaacaaacaggggctaagtccac

SEQ ID NO: 989 - skipped

SEQ ID NO: 990 - DNA, 72 bp, synthetic construct
  misc_feature 1..72: note = Synthetic: 5883_Human_quadMut_3T_8T_46A_62T_n1
  source 1..72: mol_type = other DNA
ggtggagtctgctggtgaatattaaccaaggtcaccccagttatcagaggagcaaacagggtctaagtccac

SEQ ID NO: 991 - DNA, 72 bp, synthetic construct
  misc_feature 1..72: note = Synthetic: 5884_Human_quadMut_3T_8C_46A_72A_n1
  source 1..72: mol_type = other DNA
ggtggagcctgctggtgaatattaaccaaggtcaccccagttatcagaggagcaaacaggggctaagtccaa

SEQ ID NO: 992 - DNA, 72 bp, synthetic construct
  misc_feature 1..72: note = Synthetic: 5886_Human_quadMut_3T_8T_48G_62T_n1
  source 1..72: mol_type = other DNA
ggtggagtctgctggtgaatattaaccaaggtcaccccagttatcgggggagcaaacagggtctaagtccac

SEQ ID NO: 993 - DNA, 72 bp, synthetic construct
  misc_feature 1..72: note = Synthetic: 5889_Human_quadMut_3T_8A_52T_72G_n1
  source 1..72: mol_type = other DNA
ggtggagactgctggtgaatattaaccaaggtcaccccagttatcggaggatcaaacaggggctaagtccag

SEQ ID NO: 994 - DNA, 72 bp, synthetic construct
  misc_feature 1..72: note = Synthetic: 5897_Human_quadMut_3A_14A_37T_48T_n1
  source 1..72: mol_type = other DNA
ggaggaggctgctagtgaatattaaccaaggtcacctcagttatcggtggagcaaacaggggctaagtccac

SEQ ID NO: 995 - DNA, 72 bp, synthetic construct
  misc_feature 1..72: note = Synthetic: 5899_Human_quadMut_3T_14A_37T_62T_n1
  source 1..72: mol_type = other DNA
ggtggaggctgctagtgaatattaaccaaggtcacctcagttatcggaggagcaaacagggtctaagtccac

SEQ ID NO: 996 - DNA, 72 bp, synthetic construct
  misc_feature 1..72: note = Synthetic: 5905_Human_quadMut_3A_14T_45T_72A_n1
  source 1..72: mol_type = other DNA
ggaggaggctgcttgtgaatattaaccaaggtcaccccagttattggaggagcaaacaggggctaagtccaa

SEQ ID NO: 997 - DNA, 72 bp, synthetic construct
  misc_feature 1..72: note = Synthetic: 5907_Human_quadMut_3T_14A_46T_52T_n1
  source 1..72: mol_type = other DNA
ggtggaggctgctagtgaatattaaccaaggtcaccccagttatctgaggatcaaacaggggctaagtccac

SEQ ID NO: 998 - DNA, 72 bp, synthetic construct
  misc_feature 1..72: note = Synthetic: 5908_Human_quadMut_3T_14A_46A_62T_n1
  source 1..72: mol_type = other DNA
ggtggaggctgctagtgaatattaaccaaggtcaccccagttatcagaggagcaaacagggtctaagtccac

SEQ ID NO: 999 - DNA, 72 bp, synthetic construct
  misc_feature 1..72: note = Synthetic: 5911_Human_quadMut_3T_14T_48T_62C_n1
  source 1..72: mol_type = other DNA
ggtggaggctgcttgtgaatattaaccaaggtcaccccagttatcggtggagcaaacagggcctaagtccac

SEQ ID NO: 1000 - DNA, 72 bp, synthetic construct
  misc_feature 1..72: note = Synthetic: 5914_Human_quadMut_3T_14A_52A_72A_n1
  source 1..72: mol_type = other DNA
ggtggaggctgctagtgaatattaaccaaggtcaccccagttatcggaggaacaaacaggggctaagtccaa

SEQ ID NO: 1001 - DNA, 72 bp, synthetic construct
  misc_feature 1..72: note = Synthetic: 5916_Human_quadMut_3A_35A_37T_45G_n1
  source 1..72: mol_type = other DNA
ggaggaggctgctggtgaatattaaccaaggtcaactcagttatgggaggagcaaacaggggctaagtccac

SEQ ID NO: 1002 - DNA, 72 bp, synthetic construct
  misc_feature 1..72: note = Synthetic: 5917_Human_quadMut_3T_35A_37A_46A_n1
  source 1..72: mol_type = other DNA
ggtggaggctgctggtgaatattaaccaaggtcaacacagttatcagaggagcaaacaggggctaagtccac

SEQ ID NO: 1003 - DNA, 72 bp, synthetic construct
  misc_feature 1..72: note = Synthetic: 5919_Human_quadMut_3A_35T_37A_52T_n1
  source 1..72: mol_type = other DNA
ggaggaggctgctggtgaatattaaccaaggtcatcacagttatcggaggatcaaacaggggctaagtccac

SEQ ID NO: 1004 - DNA, 72 bp, synthetic construct
  misc_feature 1..72: note = Synthetic: 5921_Human_quadMut_3T_35G_45T_46T_n1
  source 1..72: mol_type = other DNA
ggtggaggctgctggtgaatattaaccaaggtcagcccagttatttgaggagcaaacaggggctaagtccac

SEQ ID NO: 1005 - DNA, 72 bp, synthetic construct
  misc_feature 1..72: note = Synthetic: 5926_Human_quadMut_3T_35T_46A_52C_n1
  source 1..72: mol_type = other DNA
ggtggaggctgctggtgaatattaaccaaggtcatcccagttatcagaggaccaaacaggggctaagtccac

SEQ ID NO: 1006 - DNA, 72 bp, synthetic construct
  misc_feature 1..72: note = Synthetic: 5927_Human_quadMut_3T_35A_46T_62T_n1
  source 1..72: mol_type = other DNA
ggtggaggctgctggtgaatattaaccaaggtcaacccagttatctgaggagcaaacagggtctaagtccac

SEQ ID NO: 1007 - DNA, 72 bp, synthetic construct
  misc_feature 1..72: note = Synthetic: 5929_Human_quadMut_3A_35T_48G_52T_n1
  source 1..72: mol_type = other DNA
ggaggaggctgctggtgaatattaaccaaggtcatcccagttatcgggggatcaaacaggggctaagtccac

SEQ ID NO: 1008 - DNA, 72 bp, synthetic construct
  misc_feature 1..72: note = Synthetic: 5930_Human_quadMut_3T_35T_48T_62C_n1
  source 1..72: mol_type = other DNA
ggtggaggctgctggtgaatattaaccaaggtcatcccagttatcggtggagcaaacagggcctaagtccac

SEQ ID NO: 1009 - DNA, 72 bp, synthetic construct
  misc_feature 1..72: note = Synthetic: 5932_Human_quadMut_3T_35G_52T_72G_n1
  source 1..72: mol_type = other DNA
ggtggaggctgctggtgaatattaaccaaggtcagcccagttatcggaggatcaaacaggggctaagtccag

SEQ ID NO: 1010 - DNA, 72 bp, synthetic construct
  misc_feature 1..72: note = Synthetic: 5933_Human_quadMut_3T_35T_62A_72T_n1
  source 1..72: mol_type = other DNA
ggtggaggctgctggtgaatattaaccaaggtcatcccagttatcggaggagcaaacagggactaagtccat

SEQ ID NO: 1011 - DNA, 72 bp, synthetic construct
  misc_feature 1..72: note = Synthetic: 5934_Human_quadMut_3T_37A_45G_46T_n1
  source 1..72: mol_type = other DNA
ggtggaggctgctggtgaatattaaccaaggtcaccacagttatgtgaggagcaaacaggggctaagtccac

SEQ ID NO: 1012 - DNA, 72 bp, synthetic construct
  misc_feature 1..72: note = Synthetic: 5936_Human_quadMut_3T_37A_45G_52A_n1
  source 1..72: mol_type = other DNA
ggtggaggctgctggtgaatattaaccaaggtcaccacagttatgggaggaacaaacaggggctaagtccac

SEQ ID NO: 1013 - DNA, 72 bp, synthetic construct
  misc_feature 1..72: note = Synthetic: 5941_Human_quadMut_3A_37T_48T_72T_n1
  source 1..72: mol_type = other DNA
ggaggaggctgctggtgaatattaaccaaggtcacctcagttatcggtggagcaaacaggggctaagtccat

SEQ ID NO: 1014 - DNA, 72 bp, synthetic construct
  misc_feature 1..72: note = Synthetic: 5944_Human_quadMut_3A_37A_62T_72A_n1
  source 1..72: mol_type = other DNA
ggaggaggctgctggtgaatattaaccaaggtcaccacagttatcggaggagcaaacagggtctaagtccaa

SEQ ID NO: 1015 - DNA, 72 bp, synthetic construct
  misc_feature 1..72: note = Synthetic: 5948_Human_quadMut_3A_45A_46A_72A_n1
  source 1..72: mol_type = other DNA
ggaggaggctgctggtgaatattaaccaaggtcaccccagttataagaggagcaaacaggggctaagtccaa

SEQ ID NO: 1016 - DNA, 72 bp, synthetic construct
  misc_feature 1..72: note = Synthetic: 5950_Human_quadMut_3T_45A_48T_62T_n1
  source 1..72: mol_type = other DNA
ggtggaggctgctggtgaatattaaccaaggtcaccccagttataggtggagcaaacagggtctaagtccac

SEQ ID NO: 1017 - DNA, 72 bp, synthetic construct
  misc_feature 1..72: note = Synthetic: 5956_Human_quadMut_3T_46A_48T_72A_n1
  source 1..72: mol_type = other DNA
ggtggaggctgctggtgaatattaaccaaggtcaccccagttatcagtggagcaaacaggggctaagtccaa

SEQ ID NO: 1018 - DNA, 72 bp, synthetic construct
  misc_feature 1..72: note = Synthetic: 5962_Human_quadMut_3T_52T_62T_72T_n1
  source 1..72: mol_type = other DNA
ggtggaggctgctggtgaatattaaccaaggtcaccccagttatcggaggatcaaacagggtctaagtccat

SEQ ID NO: 1019 - DNA, 72 bp, synthetic construct
  misc_feature 1..72: note = Synthetic: 5963_Human_quadMut_8T_14A_35G_37T_n1
  source 1..72: mol_type = other DNA
gggggagtctgctagtgaatattaaccaaggtcagctcagttatcggaggagcaaacaggggctaagtccac

SEQ ID NO: 1020 - DNA, 72 bp, synthetic construct
  misc_feature 1..72: note = Synthetic: 5968_Human_quadMut_8T_14T_35A_62T_n1
  source 1..72: mol_type = other DNA
gggggagtctgcttgtgaatattaaccaaggtcaacccagttatcggaggagcaaacagggtctaagtccac

SEQ ID NO: 1021 - DNA, 72 bp, synthetic construct
  misc_feature 1..72: note = Synthetic: 5971_Human_quadMut_8T_14A_37A_46A_n1
  source 1..72: mol_type = other DNA
gggggagtctgctagtgaatattaaccaaggtcaccacagttatcagaggagcaaacaggggctaagtccac

SEQ ID NO: 1022 - DNA, 72 bp, synthetic construct
  misc_feature 1..72: note = Synthetic: 5984_Human_quadMut_8A_14A_48G_52T_n1
  source 1..72: mol_type = other DNA
gggggagactgctagtgaatattaaccaaggtcaccccagttatcgggggatcaaacaggggctaagtccac

SEQ ID NO: 1023 - DNA, 72 bp, synthetic construct
  misc_feature 1..72: note = Synthetic: 5985_Human_quadMut_8T_14T_48G_62A_n1
  source 1..72: mol_type = other DNA
gggggagtctgcttgtgaatattaaccaaggtcaccccagttatcgggggagcaaacagggactaagtccac

SEQ ID NO: 1024 - DNA, 72 bp, synthetic construct
  misc_feature 1..72: note = Synthetic: 5990_Human_quadMut_8A_35T_37T_45G_n1
  source 1..72: mol_type = other DNA
gggggagactgctggtgaatattaaccaaggtcatctcagttatgggaggagcaaacaggggctaagtccac

SEQ ID NO: 1025 - DNA, 72 bp, synthetic construct
  misc_feature 1..72: note = Synthetic: 5991_Human_quadMut_8A_35G_37T_46T_n1
  source 1..72: mol_type = other DNA
gggggagactgctggtgaatattaaccaaggtcagctcagttatctgaggagcaaacaggggctaagtccac

SEQ ID NO: 1026 - DNA, 72 bp, synthetic construct
  misc_feature 1..72: note = Synthetic: 5993_Human_quadMut_8C_35A_37T_52T_n1
  source 1..72: mol_type = other DNA
gggggagcctgctggtgaatattaaccaaggtcaactcagttatcggaggatcaaacaggggctaagtccac

SEQ ID NO: 1027 - DNA, 72 bp, synthetic construct
  misc_feature 1..72: note = Synthetic: 5995_Human_quadMut_8A_35G_45A_46A_n1
  source 1..72: mol_type = other DNA
gggggagactgctggtgaatattaaccaaggtcagcccagttataagaggagcaaacaggggctaagtccac

SEQ ID NO: 1028 - DNA, 72 bp, synthetic construct
  misc_feature 1..72: note = Synthetic: 5996_Human_quadMut_8C_35A_45T_48T_n1
  source 1..72: mol_type = other DNA
gggggagcctgctggtgaatattaaccaaggtcaacccagttattggtggagcaaacaggggctaagtccac

SEQ ID NO: 1029 - DNA, 69 bp, synthetic construct
  misc_feature 1..69: note = Synthetic: 2290_ChineseTreeShrewMod_monoMut_G2A_n1
  source 1..69: mol_type = other DNA
gaaggctgttggtgaatattaaccaaggtcacctcagttatcggaggagcaaacaagggctaagtccac

SEQ ID NO: 1030 - DNA, 69 bp, synthetic construct
  misc_feature 1..69: note = Synthetic: 2293_ChineseTreeShrewMod_monoMut_A3C_n1
  source 1..69: mol_type = other DNA
ggcggctgttggtgaatattaaccaaggtcacctcagttatcggaggagcaaacaagggctaagtccac

SEQ ID NO: 1031 - DNA, 69 bp, synthetic construct
  misc_feature 1..69: note = Synthetic: 2295_ChineseTreeShrewMod_monoMut_A3T_n1
  source 1..69: mol_type = other DNA
ggtggctgttggtgaatattaaccaaggtcacctcagttatcggaggagcaaacaagggctaagtccac

SEQ ID NO: 1032 - DNA, 69 bp, synthetic construct
  misc_feature 1..69: note = Synthetic: 2296_ChineseTreeShrewMod_monoMut_G4A_n1
  source 1..69: mol_type = other DNA
ggaagctgttggtgaatattaaccaaggtcacctcagttatcggaggagcaaacaagggctaagtccac

SEQ ID NO: 1033 - DNA, 69 bp, synthetic construct
  misc_feature 1..69: note = Synthetic: 2298_ChineseTreeShrewMod_monoMut_G4T_n1
  source 1..69: mol_type = other DNA
ggatgctgttggtgaatattaaccaaggtcacctcagttatcggaggagcaaacaagggctaagtccac

SEQ ID NO: 1034 - DNA, 69 bp, synthetic construct
  misc_feature 1..69: note = Synthetic: 2302_ChineseTreeShrewMod_monoMut_C6A_n1
  source 1..69: mol_type = other DNA
ggaggatgttggtgaatattaaccaaggtcacctcagttatcggaggagcaaacaagggctaagtccac

SEQ ID NO: 1035 - DNA, 69 bp, synthetic construct
  misc_feature 1..69: note = Synthetic: 2305_ChineseTreeShrewMod_monoMut_T7A_n1
  source 1..69: mol_type = other DNA
ggaggcagttggtgaatattaaccaaggtcacctcagttatcggaggagcaaacaagggctaagtccac

SEQ ID NO: 1036 - DNA, 69 bp, synthetic construct
  misc_feature 1..69: note = Synthetic: 2309_ChineseTreeShrewMod_monoMut_G8C_n1
  source 1..69: mol_type = other DNA
ggaggctcttggtgaatattaaccaaggtcacctcagttatcggaggagcaaacaagggctaagtccac

SEQ ID NO: 1037 - DNA, 69 bp, synthetic construct
  misc_feature 1..69: note = Synthetic: 2310_ChineseTreeShrewMod_monoMut_G8T_n1
  source 1..69: mol_type = other DNA
ggaggcttttggtgaatattaaccaaggtcacctcagttatcggaggagcaaacaagggctaagtccac

SEQ ID NO: 1038 - DNA, 69 bp, synthetic construct
  misc_feature 1..69: note = Synthetic: 2314_ChineseTreeShrewMod_monoMut_T10A_n1
  source 1..69: mol_type = other DNA
ggaggctgtaggtgaatattaaccaaggtcacctcagttatcggaggagcaaacaagggctaagtccac

SEQ ID NO: 1039 - DNA, 69 bp, synthetic construct
  misc_feature 1..69: note = Synthetic: 2316_ChineseTreeShrewMod_monoMut_T10G_n1
  source 1..69: mol_type = other DNA
ggaggctgtgggtgaatattaaccaaggtcacctcagttatcggaggagcaaacaagggctaagtccac

SEQ ID NO: 1040 - DNA, 69 bp, synthetic construct
  misc_feature 1..69: note = Synthetic: 2317_ChineseTreeShrewMod_monoMut_G11A_n1
  source 1..69: mol_type = other DNA
ggaggctgttagtgaatattaaccaaggtcacctcagttatcggaggagcaaacaagggctaagtccac

SEQ ID NO: 1041 - DNA, 69 bp, synthetic construct
  misc_feature 1..69: note = Synthetic: 2319_ChineseTreeShrewMod_monoMut_G11T_n1
  source 1..69: mol_type = other DNA
ggaggctgtttgtgaatattaaccaaggtcacctcagttatcggaggagcaaacaagggctaagtccac

SEQ ID NO: 1042 - DNA, 69 bp, synthetic construct
  misc_feature 1..69: note = Synthetic: 2321_ChineseTreeShrewMod_monoMut_G12C_n1
  source 1..69: mol_type = other DNA
ggaggctgttgctgaatattaaccaaggtcacctcagttatcggaggagcaaacaagggctaagtccac

SEQ ID NO: 1043 - DNA, 69 bp, synthetic construct
  misc_feature 1..69: note = Synthetic: 2325_ChineseTreeShrewMod_monoMut_T13G_n1
  source 1..69: mol_type = other DNA
ggaggctgttggggaatattaaccaaggtcacctcagttatcggaggagcaaacaagggctaagtccac

SEQ ID NO: 1044 - DNA, 69 bp, synthetic construct
  misc_feature 1..69: note = Synthetic: 2326_ChineseTreeShrewMod_monoMut_G14A_n1
  source 1..69: mol_type = other DNA
ggaggctgttggtaaatattaaccaaggtcacctcagttatcggaggagcaaacaagggctaagtccac

SEQ ID NO: 1045 - DNA, 69 bp, synthetic construct
  misc_feature 1..69: note = Synthetic: 2327_ChineseTreeShrewMod_monoMut_G14C_n1
  source 1..69: mol_type = other DNA
ggaggctgttggtcaatattaaccaaggtcacctcagttatcggaggagcaaacaagggctaagtccac

SEQ ID NO: 1046 - DNA, 69 bp, synthetic construct
  misc_feature 1..69: note = Synthetic: 2328_ChineseTreeShrewMod_monoMut_G14T_n1
  source 1..69: mol_type = other DNA
ggaggctgttggttaatattaaccaaggtcacctcagttatcggaggagcaaacaagggctaagtccac

SEQ ID NO: 1047 - DNA, 69 bp, synthetic construct
  misc_feature 1..69: note = Synthetic: 2331_ChineseTreeShrewMod_monoMut_A15T_n1
  source 1..69: mol_type = other DNA
ggaggctgttggtgtatattaaccaaggtcacctcagttatcggaggagcaaacaagggctaagtccac

SEQ ID NO: 1048 - DNA, 69 bp, synthetic construct
  misc_feature 1..69: note = Synthetic: 2332_ChineseTreeShrewMod_monoMut_A16C_n1
  source 1..69: mol_type = other DNA
ggaggctgttggtgactattaaccaaggtcacctcagttatcggaggagcaaacaagggctaagtccac

SEQ ID NO: 1049 - DNA, 69 bp, synthetic construct
  misc_feature 1..69: note = Synthetic: 2334_ChineseTreeShrewMod_monoMut_A16T_n1
  source 1..69: mol_type = other DNA
ggaggctgttggtgattattaaccaaggtcacctcagttatcggaggagcaaacaagggctaagtccac

SEQ ID NO: 1050 - DNA, 69 bp, synthetic construct
  misc_feature 1..69: note = Synthetic: 2336_ChineseTreeShrewMod_monoMut_T17C_n1
  source 1..69: mol_type = other DNA
ggaggctgttggtgaacattaaccaaggtcacctcagttatcggaggagcaaacaagggctaagtccac

SEQ ID NO: 1051 - DNA, 69 bp, synthetic construct
  misc_feature 1..69: note = Synthetic: 2337_ChineseTreeShrewMod_monoMut_T17G_n1
  source 1..69: mol_type = other DNA
ggaggctgttggtgaagattaaccaaggtcacctcagttatcggaggagcaaacaagggctaagtccac

SEQ ID NO: 1052 - DNA, 69 bp, synthetic construct
  misc_feature 1..69: note = Synthetic: 2344_ChineseTreeShrewMod_monoMut_T20A_n1
  source 1..69: mol_type = other DNA
ggaggctgttggtgaatataaaccaaggtcacctcagttatcggaggagcaaacaagggctaagtccac

SEQ ID NO: 1053 - DNA, 69 bp, synthetic construct
  misc_feature 1..69: note = Synthetic: 2345_ChineseTreeShrewMod_monoMut_T20C_n1
  source 1..69: mol_type = other DNA
ggaggctgttggtgaatatcaaccaaggtcacctcagttatcggaggagcaaacaagggctaagtccac

SEQ ID NO: 1054 - DNA, 69 bp, synthetic construct
  misc_feature 1..69: note = Synthetic: 2346_ChineseTreeShrewMod_monoMut_T20G_n1
  source 1..69: mol_type = other DNA
ggaggctgttggtgaatatgaaccaaggtcacctcagttatcggaggagcaaacaagggctaagtccac

SEQ ID NO: 1055 - DNA, 69 bp, synthetic construct
  misc_feature 1..69: note = Synthetic: 2351_ChineseTreeShrewMod_monoMut_A22G_n1
  source 1..69: mol_type = other DNA
ggaggctgttggtgaatattagccaaggtcacctcagttatcggaggagcaaacaagggctaagtccac

SEQ ID NO: 1056 - DNA, 69 bp, synthetic construct
  misc_feature 1..69: note = Synthetic: 2352_ChineseTreeShrewMod_monoMut_A22T_n1
  source 1..69: mol_type = other DNA
ggaggctgttggtgaatattatccaaggtcacctcagttatcggaggagcaaacaagggctaagtccac

SEQ ID NO: 1057 - DNA, 69 bp, synthetic construct
  misc_feature 1..69: note = Synthetic: 2360_ChineseTreeShrewMod_monoMut_A25G_n1
  source 1..69: mol_type = other DNA
ggaggctgttggtgaatattaaccgaggtcacctcagttatcggaggagcaaacaagggctaagtccac

SEQ ID NO: 1058 - DNA, 69 bp, synthetic construct
  misc_feature 1..69: note = Synthetic: 2363_ChineseTreeShrewMod_monoMut_A26G_n1
  source 1..69: mol_type = other DNA
ggaggctgttggtgaatattaaccagggtcacctcagttatcggaggagcaaacaagggctaagtccac

SEQ ID NO: 1059 - DNA, 69 bp, synthetic construct
  misc_feature 1..69: note = Synthetic: 2365_ChineseTreeShrewMod_monoMut_G27A_n1
  source 1..69: mol_type = other DNA
ggaggctgttggtgaatattaaccaaagtcacctcagttatcggaggagcaaacaagggctaagtccac

SEQ ID NO: 1060 - DNA, 69 bp, synthetic construct
  misc_feature 1..69: note = Synthetic: 2369_ChineseTreeShrewMod_monoMut_G28C_n1
  source 1..69: mol_type = other DNA
ggaggctgttggtgaatattaaccaagctcacctcagttatcggaggagcaaacaagggctaagtccac

SEQ ID NO: 1061 - DNA, 69 bp, synthetic construct
  misc_feature 1..69: note = Synthetic: 2372_ChineseTreeShrewMod_monoMut_T29C_n1
  source 1..69: mol_type = other DNA
ggaggctgttggtgaatattaaccaaggccacctcagttatcggaggagcaaacaagggctaagtccac

SEQ ID NO: 1062 - DNA, 69 bp, synthetic construct
  misc_feature 1..69: note = Synthetic: 2373_ChineseTreeShrewMod_monoMut_T29G_n1
  source 1..69: mol_type = other DNA
ggaggctgttggtgaatattaaccaagggcacctcagttatcggaggagcaaacaagggctaagtccac

SEQ ID NO: 1063 - DNA, 69 bp, synthetic construct
  misc_feature 1..69: note = Synthetic: 2375_ChineseTreeShrewMod_monoMut_C30G_n1
  source 1..69: mol_type = other DNA
ggaggctgttggtgaatattaaccaaggtgacctcagttatcggaggagcaaacaagggctaagtccac

SEQ ID NO: 1064 - DNA, 69 bp, synthetic construct
  misc_feature 1..69: note = Synthetic: 2378_ChineseTreeShrewMod_monoMut_A31G_n1
  source 1..69: mol_type = other DNA
ggaggctgttggtgaatattaaccaaggtcgcctcagttatcggaggagcaaacaagggctaagtccac

SEQ ID NO: 1065 - DNA, 69 bp, synthetic construct
  misc_feature 1..69: note = Synthetic: 2379_ChineseTreeShrewMod_monoMut_A31T_n1
  source 1..69: mol_type = other DNA
ggaggctgttggtgaatattaaccaaggtctcctcagttatcggaggagcaaacaagggctaagtccac

SEQ ID NO: 1066 - DNA, 69 bp, synthetic construct
  misc_feature 1..69: note = Synthetic: 2380_ChineseTreeShrewMod_monoMut_C32A_n1
  source 1..69: mol_type = other DNA
ggaggctgttggtgaatattaaccaaggtcaactcagttatcggaggagcaaacaagggctaagtccac

SEQ ID NO: 1067 - DNA, 69 bp, synthetic construct
  misc_feature 1..69: note = Synthetic: 2381_ChineseTreeShrewMod_monoMut_C32G_n1
  source 1..69: mol_type = other DNA
ggaggctgttggtgaatattaaccaaggtcagctcagttatcggaggagcaaacaagggctaagtccac

SEQ ID NO: 1068 - DNA, 69 bp, synthetic construct
  misc_feature 1..69: note = Synthetic: 2382_ChineseTreeShrewMod_monoMut_C32T_n1
  source 1..69: mol_type = other DNA
ggaggctgttggtgaatattaaccaaggtcatctcagttatcggaggagcaaacaagggctaagtccac

SEQ ID NO: 1069 - DNA, 69 bp, synthetic construct
  misc_feature 1..69: note = Synthetic: 2383_ChineseTreeShrewMod_monoMut_C33A_n1
  source 1..69: mol_type = other DNA
ggaggctgttggtgaatattaaccaaggtcacatcagttatcggaggagcaaacaagggctaagtccac

SEQ ID NO: 1070 - DNA, 69 bp, synthetic construct
  misc_feature 1..69: note = Synthetic: 2385_ChineseTreeShrewMod_monoMut_C33T_n1
  source 1..69: mol_type = other DNA
ggaggctgttggtgaatattaaccaaggtcacttcagttatcggaggagcaaacaagggctaagtccac

SEQ ID NO: 1071 - DNA, 69 bp, synthetic construct
  misc_feature 1..69: note = Synthetic: 2389_ChineseTreeShrewMod_monoMut_C35A_n1
  source 1..69: mol_type = other DNA
ggaggctgttggtgaatattaaccaaggtcacctaagttatcggaggagcaaacaagggctaagtccac

SEQ ID NO: 1072 - DNA, 69 bp, synthetic construct
  misc_feature 1..69: note = Synthetic: 2390_ChineseTreeShrewMod_monoMut_C35G_n1
  source 1..69: mol_type = other DNA
ggaggctgttggtgaatattaaccaaggtcacctgagttatcggaggagcaaacaagggctaagtccac

SEQ ID NO: 1073 - DNA, 69 bp, synthetic construct
  misc_feature 1..69: note = Synthetic: 2392_ChineseTreeShrewMod_monoMut_A36C_n1
  source 1..69: mol_type = other DNA
ggaggctgttggtgaatattaaccaaggtcacctccgttatcggaggagcaaacaagggctaagtccac

SEQ ID NO: 1074 - DNA, 69 bp, synthetic construct
  misc_feature 1..69: note = Synthetic: 2393_ChineseTreeShrewMod_monoMut_A36G_n1
  source 1..69: mol_type = other DNA
ggaggctgttggtgaatattaaccaaggtcacctcggttatcggaggagcaaacaagggctaagtccac

SEQ ID NO: 1075 - DNA, 69 bp, synthetic construct
  misc_feature 1..69: note = Synthetic: 2394_ChineseTreeShrewMod_monoMut_A36T_n1
  source 1..69: mol_type = other DNA
ggaggctgttggtgaatattaaccaaggtcacctctgttatcggaggagcaaacaagggctaagtccac

SEQ ID NO: 1076 - DNA, 69 bp, synthetic construct
  misc_feature 1..69: note = Synthetic: 2396_ChineseTreeShrewMod_monoMut_G37C_n1
  source 1..69: mol_type = other DNA
ggaggctgttggtgaatattaaccaaggtcacctcacttatcggaggagcaaacaagggctaagtccac

SEQ ID NO: 1077 - DNA, 69 bp, synthetic construct
  misc_feature 1..69: note = Synthetic: 2398_ChineseTreeShrewMod_monoMut_T38A_n1
  source 1..69: mol_type = other DNA
ggaggctgttggtgaatattaaccaaggtcacctcagatatcggaggagcaaacaagggctaagtccac

SEQ ID NO: 1078 - DNA, 69 bp, synthetic construct
  misc_feature 1..69: note = Synthetic: 2399_ChineseTreeShrewMod_monoMut_T38C_n1
  source 1..69: mol_type = other DNA
ggaggctgttggtgaatattaaccaaggtcacctcagctatcggaggagcaaacaagggctaagtccac

SEQ ID NO: 1079 - DNA, 69 bp, synthetic construct
  misc_feature 1..69: note = Synthetic: 2400_ChineseTreeShrewMod_monoMut_T38G_n1
  source 1..69: mol_type = other DNA
ggaggctgttggtgaatattaaccaaggtcacctcaggtatcggaggagcaaacaagggctaagtccac

SEQ ID NO: 1080 - DNA, 69 bp, synthetic construct
  misc_feature 1..69: note = Synthetic: 2402_ChineseTreeShrewMod_monoMut_T39C_n1
  source 1..69: mol_type = other DNA
ggaggctgttggtgaatattaaccaaggtcacctcagtcatcggaggagcaaacaagggctaagtccac

SEQ ID NO: 1081 - DNA, 69 bp, synthetic construct
  misc_feature 1..69: note = Synthetic: 2403_ChineseTreeShrewMod_monoMut_T39G_n1
  source 1..69: mol_type = other DNA
ggaggctgttggtgaatattaaccaaggtcacctcagtgatcggaggagcaaacaagggctaagtccac

SEQ ID NO: 1082 - DNA, 69 bp, synthetic construct
  misc_feature 1..69: note = Synthetic: 2405_ChineseTreeShrewMod_monoMut_A40G_n1
  source 1..69: mol_type = other DNA
ggaggctgttggtgaatattaaccaaggtcacctcagttgtcggaggagcaaacaagggctaagtccac

SEQ ID NO: 1083 - DNA, 69 bp, synthetic construct
  misc_feature 1..69: note = Synthetic: 2407_ChineseTreeShrewMod_monoMut_T41A_n1
  source 1..69: mol_type = other DNA
ggaggctgttggtgaatattaaccaaggtcacctcagttaacggaggagcaaacaagggctaagtccac

SEQ ID NO: 1084 - DNA, 69 bp, synthetic construct
  misc_feature 1..69: note = Synthetic: 2409_ChineseTreeShrewMod_monoMut_T41G_n1
  source 1..69: mol_type = other DNA
ggaggctgttggtgaatattaaccaaggtcacctcagttagcggaggagcaaacaagggctaagtccac

SEQ ID NO: 1085 - DNA, 69 bp, synthetic construct
  misc_feature 1..69: note = Synthetic: 2411_ChineseTreeShrewMod_monoMut_C42G_n1
  source 1..69: mol_type = other DNA
ggaggctgttggtgaatattaaccaaggtcacctcagttatgggaggagcaaacaagggctaagtccac

SEQ ID NO: 1086 - DNA, 69 bp, synthetic construct
  misc_feature 1..69: note = Synthetic: 2413_ChineseTreeShrewMod_monoMut_G43A_n1
  source 1..69: mol_type = other DNA
ggaggctgttggtgaatattaaccaaggtcacctcagttatcagaggagcaaacaagggctaagtccac

SEQ ID NO: 1087 - DNA, 69 bp, synthetic construct
  misc_feature 1..69: note = Synthetic: 2414_ChineseTreeShrewMod_monoMut_G43C_n1
  source 1..69: mol_type = other DNA
ggaggctgttggtgaatattaaccaaggtcacctcagttatccgaggagcaaacaagggctaagtccac

SEQ ID NO: 1088 - DNA, 69 bp, synthetic construct
  misc_feature 1..69: note = Synthetic: 2416_ChineseTreeShrewMod_monoMut_G44A_n1
  source 1..69: mol_type = other DNA
ggaggctgttggtgaatattaaccaaggtcacctcagttatcgaaggagcaaacaagggctaagtccac

SEQ ID NO: 1089 - DNA, 69 bp, synthetic construct
  misc_feature 1..69: note = Synthetic: 2417_ChineseTreeShrewMod_monoMut_G44C_n1
  source 1..69: mol_type = other DNA
ggaggctgttggtgaatattaaccaaggtcacctcagttatcgcaggagcaaacaagggctaagtccac

SEQ ID NO: 1090 - DNA, 69 bp, synthetic construct
  misc_feature 1..69: note = Synthetic: 2419_ChineseTreeShrewMod_monoMut_A45C_n1
  source 1..69: mol_type = other DNA
ggaggctgttggtgaatattaaccaaggtcacctcagttatcggcggagcaaacaagggctaagtccac

SEQ ID NO: 1091 - DNA, 69 bp, synthetic construct
  misc_feature 1..69: note = Synthetic: 2422_ChineseTreeShrewMod_monoMut_G46A_n1
  source 1..69: mol_type = other DNA
ggaggctgttggtgaatattaaccaaggtcacctcagttatcggaagagcaaacaagggctaagtccac

SEQ ID NO: 1092 - DNA, 69 bp, synthetic construct
  misc_feature 1..69: note = Synthetic: 2423_ChineseTreeShrewMod_monoMut_G46C_n1
  source 1..69: mol_type = other DNA
ggaggctgttggtgaatattaaccaaggtcacctcagttatcggacgagcaaacaagggctaagtccac

SEQ ID NO: 1093 - DNA, 69 bp, synthetic construct
  misc_feature 1..69: note = Synthetic: 2424_ChineseTreeShrewMod_monoMut_G46T_n1
  source 1..69: mol_type = other DNA
ggaggctgttggtgaatattaaccaaggtcacctcagttatcggatgagcaaacaagggctaagtccac

SEQ ID NO: 1094 - DNA, 69 bp, synthetic construct
  misc_feature 1..69: note = Synthetic: 2425_ChineseTreeShrewMod_monoMut_G47A_n1
  source 1..69: mol_type = other DNA
ggaggctgttggtgaatattaaccaaggtcacctcagttatcggagaagcaaacaagggctaagtccac

SEQ ID NO: 1095 - DNA, 69 bp, synthetic construct
  misc_feature 1..69: note = Synthetic: 2426_ChineseTreeShrewMod_monoMut_G47C_n1
  source 1..69: mol_type = other DNA
ggaggctgttggtgaatattaaccaaggtcacctcagttatcggagcagcaaacaagggctaagtccac

SEQ ID NO: 1096 - DNA, 69 bp, synthetic construct
  misc_feature 1..69: note = Synthetic: 2428_ChineseTreeShrewMod_monoMut_A48C_n1
  source 1..69: mol_type = other DNA
ggaggctgttggtgaatattaaccaaggtcacctcagttatcggaggcgcaaacaagggctaagtccac

SEQ ID NO: 1097 - DNA, 69 bp, synthetic construct
  misc_feature 1..69: note = Synthetic: 2429_ChineseTreeShrewMod_monoMut_A48G_n1
  source 1..69: mol_type = other DNA
ggaggctgttggtgaatattaaccaaggtcacctcagttatcggaggggcaaacaagggctaagtccac

SEQ ID NO: 1098 - DNA, 69 bp, synthetic construct
  misc_feature 1..69: note = Synthetic: 2430_ChineseTreeShrewMod_monoMut_A48T_n1
  source 1..69: mol_type = other DNA
ggaggctgttggtgaatattaaccaaggtcacctcagttatcggaggtgcaaacaagggctaagtccac

SEQ ID NO: 1099 - DNA, 69 bp, synthetic construct
  misc_feature 1..69: note = Synthetic: 2431_ChineseTreeShrewMod_monoMut_G49A_n1
  source 1..69: mol_type = other DNA
ggaggctgttggtgaatattaaccaaggtcacctcagttatcggaggaacaaacaagggctaagtccac

SEQ ID NO: 1100 - DNA, 69 bp, synthetic construct
  misc_feature 1..69: note = Synthetic: 2433_ChineseTreeShrewMod_monoMut_G49T_n1
  source 1..69: mol_type = other DNA
ggaggctgttggtgaatattaaccaaggtcacctcagttatcggaggatcaaacaagggctaagtccac

SEQ ID NO: 1101 - DNA, 69 bp, synthetic construct
  misc_feature 1..69: note = Synthetic: 2436_ChineseTreeShrewMod_monoMut_C50T_n1
  source 1..69: mol_type = other DNA
ggaggctgttggtgaatattaaccaaggtcacctcagttatcggaggagtaaacaagggctaagtccac

SEQ ID NO: 1102 - DNA, 69 bp, synthetic construct
  misc_feature 1..69: note = Synthetic: 2437_ChineseTreeShrewMod_monoMut_A51C_n1
  source 1..69: mol_type = other DNA
ggaggctgttggtgaatattaaccaaggtcacctcagttatcggaggagccaacaagggctaagtccac

SEQ ID NO: 1103 - DNA, 69 bp, synthetic construct
  misc_feature 1..69: note = Synthetic: 2448_ChineseTreeShrewMod_monoMut_C54T_n1
  source 1..69: mol_type = other DNA
ggaggctgttggtgaatattaaccaaggtcacctcagttatcggaggagcaaataagggctaagtccac

SEQ ID NO: 1104 - DNA, 69 bp, synthetic construct
  misc_feature 1..69: note = Synthetic: 2450_ChineseTreeShrewMod_monoMut_A55G_n1
  source 1..69: mol_type = other DNA
ggaggctgttggtgaatattaaccaaggtcacctcagttatcggaggagcaaacgagggctaagtccac

SEQ ID NO: 1105 - DNA, 69 bp, synthetic construct
  misc_feature 1..69: note = Synthetic: 2453_ChineseTreeShrewMod_monoMut_A56G_n1
  source 1..69: mol_type = other DNA
ggaggctgttggtgaatattaaccaaggtcacctcagttatcggaggagcaaacaggggctaagtccac

SEQ ID NO: 1106 - DNA, 69 bp, synthetic construct
  misc_feature 1..69: note = Synthetic: 2454_ChineseTreeShrewMod_monoMut_A56T_n1
  source 1..69: mol_type = other DNA
ggaggctgttggtgaatattaaccaaggtcacctcagttatcggaggagcaaacatgggctaagtccac

SEQ ID NO: 1107 - DNA, 69 bp, synthetic construct
  misc_feature 1..69: note = Synthetic: 2457_ChineseTreeShrewMod_monoMut_G57T_n1
  source 1..69: mol_type = other DNA
ggaggctgttggtgaatattaaccaaggtcacctcagttatcggaggagcaaacaatggctaagtccac

SEQ ID NO: 1108 - DNA, 69 bp, synthetic construct
  misc_feature 1..69: note = Synthetic: 2459_ChineseTreeShrewMod_monoMut_G58C_n1
  source 1..69: mol_type = other DNA
ggaggctgttggtgaatattaaccaaggtcacctcagttatcggaggagcaaacaagcgctaagtccac

SEQ ID NO: 1109 - DNA, 69 bp, synthetic construct
  misc_feature 1..69: note = Synthetic: 2460_ChineseTreeShrewMod_monoMut_G58T_n1
  source 1..69: mol_type = other DNA
ggaggctgttggtgaatattaaccaaggtcacctcagttatcggaggagcaaacaagtgctaagtccac

SEQ ID NO: 1110 - DNA, 69 bp, synthetic construct
  misc_feature 1..69: note = Synthetic: 2461_ChineseTreeShrewMod_monoMut_G59A_n1
  source 1..69: mol_type = other DNA
ggaggctgttggtgaatattaaccaaggtcacctcagttatcggaggagcaaacaaggactaagtccac

SEQ ID NO: 1111 - DNA, 69 bp, synthetic construct
  misc_feature 1..69: note = Synthetic: 2462_ChineseTreeShrewMod_monoMut_G59C_n1
  source 1..69: mol_type = other DNA
ggaggctgttggtgaatattaaccaaggtcacctcagttatcggaggagcaaacaaggcctaagtccac

SEQ ID NO: 1112 - DNA, 69 bp, synthetic construct
  misc_feature 1..69: note = Synthetic: 2463_ChineseTreeShrewMod_monoMut_G59T_n1
  source 1..69: mol_type = other DNA
ggaggctgttggtgaatattaaccaaggtcacctcagttatcggaggagcaaacaaggtctaagtccac

SEQ ID NO: 1113 - DNA, 69 bp, synthetic construct
  misc_feature 1..69: note = Synthetic: 2467_ChineseTreeShrewMod_monoMut_T61A_n1
  source 1..69: mol_type = other DNA
ggaggctgttggtgaatattaaccaaggtcacctcagttatcggaggagcaaacaagggcaaagtccac

SEQ ID NO: 1114 - DNA, 69 bp, synthetic construct
  misc_feature 1..69: note = Synthetic: 2469_ChineseTreeShrewMod_monoMut_T61G_n1
  source 1..69: mol_type = other DNA
ggaggctgttggtgaatattaaccaaggtcacctcagttatcggaggagcaaacaagggcgaagtccac

SEQ ID NO: 1115 - DNA, 69 bp, synthetic construct
  misc_feature 1..69: note = Synthetic: 2482_ChineseTreeShrewMod_monoMut_C66A_n1
  source 1..69: mol_type = other DNA
ggaggctgttggtgaatattaaccaaggtcacctcagttatcggaggagcaaacaagggctaagtacac

SEQ ID NO: 1116 - DNA, 69 bp, synthetic construct
  misc_feature 1..69: note = Synthetic: 2484_ChineseTreeShrewMod_monoMut_C66T_n1
  source 1..69: mol_type = other DNA
ggaggctgttggtgaatattaaccaaggtcacctcagttatcggaggagcaaacaagggctaagttcac

SEQ ID NO: 1117 - DNA, 69 bp, synthetic construct
  misc_feature 1..69: note = Synthetic: 2491_ChineseTreeShrewMod_monoMut_C69A_n1
  source 1..69: mol_type = other DNA
ggaggctgttggtgaatattaaccaaggtcacctcagttatcggaggagcaaacaagggctaagtccaa

SEQ ID NO: 1118 - DNA, 69 bp, synthetic construct
  misc_feature 1..69: note = Synthetic: 2498_ChineseTreeShrewMod_diMut_GG1CC_n1
  source 1..69: mol_type = other DNA
ccaggctgttggtgaatattaaccaaggtcacctcagttatcggaggagcaaacaagggctaagtccac

SEQ ID NO: 1119 - DNA, 69 bp, synthetic construct
  misc_feature 1..69: note = Synthetic: 2499_ChineseTreeShrewMod_diMut_GG1CT_n1
  source 1..69: mol_type = other DNA
ctaggctgttggtgaatattaaccaaggtcacctcagttatcggaggagcaaacaagggctaagtccac

SEQ ID NO: 1120 - DNA, 69 bp, synthetic construct
  misc_feature 1..69: note = Synthetic: 2503_ChineseTreeShrewMod_diMut_GA2AC_n1
  source 1..69: mol_type = other DNA
gacggctgttggtgaatattaaccaaggtcacctcagttatcggaggagcaaacaagggctaagtccac

SEQ ID NO: 1121 - DNA, 69 bp, synthetic construct
  misc_feature 1..69: note = Synthetic: 2504_ChineseTreeShrewMod_diMut_GA2AG_n1
  source 1..69: mol_type = other DNA
gagggctgttggtgaatattaaccaaggtcacctcagttatcggaggagcaaacaagggctaagtccac

SEQ ID NO: 1122 - DNA, 69 bp, synthetic construct
  misc_feature 1..69: note = Synthetic: 2505_ChineseTreeShrewMod_diMut_GA2AT_n1
  source 1..69: mol_type = other DNA
gatggctgttggtgaatattaaccaaggtcacctcagttatcggaggagcaaacaagggctaagtccac

SEQ ID NO: 1123 - DNA, 69 bp, synthetic construct
  misc_feature 1..69: note = Synthetic: 2507_ChineseTreeShrewMod_diMut_GA2CG_n1
  source 1..69: mol_type = other DNA
gcgggctgttggtgaatattaaccaaggtcacctcagttatcggaggagcaaacaagggctaagtccac

SEQ ID NO: 1124 - DNA, 69 bp, synthetic construct
  misc_feature 1..69: note = Synthetic: 2508_ChineseTreeShrewMod_diMut_GA2CT_n1
  source 1..69: mol_type = other DNA
gctggctgttggtgaatattaaccaaggtcacctcagttatcggaggagcaaacaagggctaagtccac

SEQ ID NO: 1125 - DNA, 69 bp, synthetic construct
  misc_feature 1..69: note = Synthetic: 2510_ChineseTreeShrewMod_diMut_GA2TG_n1
  source 1..69: mol_type = other DNA
gtgggctgttggtgaatattaaccaaggtcacctcagttatcggaggagcaaacaagggctaagtccac

SEQ ID NO: 1126 - DNA, 69 bp, synthetic construct
  misc_feature 1..69: note = Synthetic: 2511_ChineseTreeShrewMod_diMut_GA2TT_n1
  source 1..69: mol_type = other DNA
gttggctgttggtgaatattaaccaaggtcacctcagttatcggaggagcaaacaagggctaagtccac

SEQ ID NO: 1127 - DNA, 69 bp, synthetic construct
  misc_feature 1..69: note = Synthetic: 2512_ChineseTreeShrewMod_diMut_AG3CA_n1
  source 1..69: mol_type = other DNA
ggcagctgttggtgaatattaaccaaggtcacctcagttatcggaggagcaaacaagggctaagtccac

SEQ ID NO: 1128 - DNA, 69 bp, synthetic construct
  misc_feature 1..69: note = Synthetic: 2514_ChineseTreeShrewMod_diMut_AG3CT_n1
  source 1..69: mol_type = other DNA
ggctgctgttggtgaatattaaccaaggtcacctcagttatcggaggagcaaacaagggctaagtccac

SEQ ID NO: 1129 - DNA, 69 bp, synthetic construct
  misc_feature 1..69: note = Synthetic: 2516_ChineseTreeShrewMod_diMut_AG3GC_n1
  source 1..69: mol_type = other DNA
gggcgctgttggtgaatattaaccaaggtcacctcagttatcggaggagcaaacaagggctaagtccac

SEQ ID NO: 1130 - DNA, 69 bp, synthetic construct
  misc_feature 1..69: note = Synthetic: 2517_ChineseTreeShrewMod_diMut_AG3GT_n1
  source 1..69: mol_type = other DNA
gggtgctgttggtgaatattaaccaaggtcacctcagttatcggaggagcaaacaagggctaagtccac

SEQ ID NO: 1131 - DNA, 69 bp, synthetic construct
  misc_feature 1..69: note = Synthetic: 2519_ChineseTreeShrewMod_diMut_AG3TC_n1
  source 1..69: mol_type = other DNA
ggtcgctgttggtgaatattaaccaaggtcacctcagttatcggaggagcaaacaagggctaagtccac

SEQ ID NO: 1132 - DNA, 69 bp, synthetic construct
  misc_feature 1..69: note = Synthetic: 2520_ChineseTreeShrewMod_diMut_AG3TT_n1
  source 1..69: mol_type = other DNA
ggttgctgttggtgaatattaaccaaggtcacctcagttatcggaggagcaaacaagggctaagtccac

SEQ ID NO: 1133 - DNA, 69 bp, synthetic construct
  misc_feature 1..69: note = Synthetic: 2521_ChineseTreeShrewMod_diMut_GG4AA_n1
  source 1..69: mol_type = other DNA
ggaaactgttggtgaatattaaccaaggtcacctcagttatcggaggagcaaacaagggctaagtccac

SEQ ID NO: 1134 - DNA, 69 bp, synthetic construct
  misc_feature 1..69: note = Synthetic: 2523_ChineseTreeShrewMod_diMut_GG4AT_n1
  source 1..69: mol_type = other DNA
ggaatctgttggtgaatattaaccaaggtcacctcagttatcggaggagcaaacaagggctaagtccac

SEQ ID NO: 1135 - DNA, 69 bp, synthetic construct
  misc_feature 1..69: note = Synthetic: 2524_ChineseTreeShrewMod_diMut_GG4CA_n1
  source 1..69: mol_type = other DNA
ggacactgttggtgaatattaaccaaggtcacctcagttatcggaggagcaaacaagggctaagtccac

SEQ ID NO: 1136 - DNA, 69 bp, synthetic construct
  misc_feature 1..69: note = Synthetic: 2525_ChineseTreeShrewMod_diMut_GG4CC_n1
  source 1..69: mol_type = other DNA
ggaccctgttggtgaatattaaccaaggtcacctcagttatcggaggagcaaacaagggctaagtccac

SEQ ID NO: 1137 - DNA, 69 bp, synthetic construct
  misc_feature 1..69: note = Synthetic: 2526_ChineseTreeShrewMod_diMut_GG4CT_n1
  source 1..69: mol_type = other DNA
ggactctgttggtgaatattaaccaaggtcacctcagttatcggaggagcaaacaagggctaagtccac

SEQ ID NO: 1138 - DNA, 69 bp, synthetic construct
  misc_feature 1..69: note = Synthetic: 2527_ChineseTreeShrewMod_diMut_GG4TA_n1
  source 1..69: mol_type = other DNA
ggatactgttggtgaatattaaccaaggtcacctcagttatcggaggagcaaacaagggctaagtccac

SEQ ID NO: 1139 - DNA, 69 bp, synthetic construct
  misc_feature 1..69: note = Synthetic: 2529_ChineseTreeShrewMod_diMut_GG4TT_n1
  source 1..69: mol_type = other DNA
ggattctgttggtgaatattaaccaaggtcacctcagttatcggaggagcaaacaagggctaagtccac

SEQ ID NO: 1140 - DNA, 69 bp, synthetic construct
  misc_feature 1..69: note = Synthetic: 2530_ChineseTreeShrewMod_diMut_GC5AA_n1
  source 1..69: mol_type = other DNA
ggagaatgttggtgaatattaaccaaggtcacctcagttatcggaggagcaaacaagggctaagtccac

SEQ ID NO: 1141 - DNA, 69 bp, synthetic construct
  misc_feature 1..69: note = Synthetic: 2531_ChineseTreeShrewMod_diMut_GC5AG_n1
  source 1..69: mol_type = other DNA
ggagagtgttggtgaatattaaccaaggtcacctcagttatcggaggagcaaacaagggctaagtccac

SEQ ID NO: 1142 - DNA, 69 bp, synthetic construct
  misc_feature 1..69: note = Synthetic: 2533_ChineseTreeShrewMod_diMut_GC5CA_n1
  source 1..69: mol_type = other DNA
ggagcatgttggtgaatattaaccaaggtcacctcagttatcggaggagcaaacaagggctaagtccac

SEQ ID NO: 1143 - DNA, 69 bp, synthetic construct
  misc_feature 1..69: note = Synthetic: 2534_ChineseTreeShrewMod_diMut_GC5CG_n1
  source 1..69: mol_type = other DNA
ggagcgtgttggtgaatattaaccaaggtcacctcagttatcggaggagcaaacaagggctaagtccac

SEQ ID NO: 1144 - DNA, 69 bp, synthetic construct
  misc_feature 1..69: note = Synthetic: 2536_ChineseTreeShrewMod_diMut_GC5TA_n1
  source 1..69: mol_type = other DNA
ggagtatgttggtgaatattaaccaaggtcacctcagttatcggaggagcaaacaagggctaagtccac

SEQ ID NO: 1145 - DNA, 69 bp, synthetic construct
  misc_feature 1..69: note = Synthetic: 2538_ChineseTreeShrewMod_diMut_GC5TT_n1
  source 1..69: mol_type = other DNA
ggagtttgttggtgaatattaaccaaggtcacctcagttatcggaggagcaaacaagggctaagtccac

SEQ ID NO: 1146 - DNA, 69 bp, synthetic construct
  misc_feature 1..69: note = Synthetic: 2540_ChineseTreeShrewMod_diMut_CT6AC_n1
  source 1..69: mol_type = other DNA
ggaggacgttggtgaatattaaccaaggtcacctcagttatcggaggagcaaacaagggctaagtccac

SEQ ID NO: 1147 - DNA, 69 bp, synthetic construct
  misc_feature 1..69: note = Synthetic: 2541_ChineseTreeShrewMod_diMut_CT6AG_n1
  source 1..69: mol_type = other DNA
ggaggaggttggtgaatattaaccaaggtcacctcagttatcggaggagcaaacaagggctaagtccac

SEQ ID NO: 1148 - DNA, 69 bp, synthetic construct
  misc_feature 1..69: note = Synthetic: 2544_ChineseTreeShrewMod_diMut_CT6GG_n1
  source 1..69: mol_type = other DNA
ggagggggttggtgaatattaaccaaggtcacctcagttatcggaggagcaaacaagggctaagtccac

SEQ ID NO: 1149 - DNA, 69 bp, synthetic construct
  misc_feature 1..69: note = Synthetic: 2547_ChineseTreeShrewMod_diMut_CT6TG_n1
  source 1..69: mol_type = other DNA
ggaggtggttggtgaatattaaccaaggtcacctcagttatcggaggagcaaacaagggctaagtccac

SEQ ID NO: 1150 - DNA, 69 bp, synthetic construct
  misc_feature 1..69: note = Synthetic: 2548_ChineseTreeShrewMod_diMut_TG7AA_n1
  source 1..69: mol_type = other DNA
ggaggcaattggtgaatattaaccaaggtcacctcagttatcggaggagcaaacaagggctaagtccac

SEQ ID NO: 1151 - DNA, 69 bp, synthetic construct
  misc_feature 1..69: note = Synthetic: 2550_ChineseTreeShrewMod_diMut_TG7AT_n1
  source 1..69: mol_type = other DNA
ggaggcatttggtgaatattaaccaaggtcacctcagttatcggaggagcaaacaagggctaagtccac

SEQ ID NO: 1152 - DNA, 69 bp, synthetic construct
  misc_feature 1..69: note = Synthetic: 2552_ChineseTreeShrewMod_diMut_TG7CC_n1
  source 1..69: mol_type = other DNA
ggaggcccttggtgaatattaaccaaggtcacctcagttatcggaggagcaaacaagggctaagtccac

SEQ ID NO: 1153 - DNA, 69 bp, synthetic construct
  misc_feature 1..69: note = Synthetic: 2553_ChineseTreeShrewMod_diMut_TG7CT_n1
  source 1..69: mol_type = other DNA
ggaggcctttggtgaatattaaccaaggtcacctcagttatcggaggagcaaacaagggctaagtccac

SEQ ID NO: 1154 - DNA, 69 bp, synthetic construct
  misc_feature 1..69: note = Synthetic: 2554_ChineseTreeShrewMod_diMut_TG7GA_n1
  source 1..69: mol_type = other DNA
ggaggcgattggtgaatattaaccaaggtcacctcagttatcggaggagcaaacaagggctaagtccac

SEQ ID NO: 1155 - DNA, 69 bp, synthetic construct
  misc_feature 1..69: note = Synthetic: 2555_ChineseTreeShrewMod_diMut_TG7GC_n1
  source 1..69: mol_type = other DNA
ggaggcgcttggtgaatattaaccaaggtcacctcagttatcggaggagcaaacaagggctaagtccac

SEQ ID NO: 1156 - DNA, 69 bp, synthetic construct
  misc_feature 1..69: note = Synthetic: 2556_ChineseTreeShrewMod_diMut_TG7GT_n1
  source 1..69: mol_type = other DNA
ggaggcgtttggtgaatattaaccaaggtcacctcagttatcggaggagcaaacaagggctaagtccac

SEQ ID NO: 1157 - DNA, 69 bp, synthetic construct
  misc_feature 1..69: note = Synthetic: 2557_ChineseTreeShrewMod_diMut_GT8AA_n1
  source 1..69: mol_type = other DNA
ggaggctaatggtgaatattaaccaaggtcacctcagttatcggaggagcaaacaagggctaagtccac

SEQ ID NO: 1158 - DNA, 69 bp, synthetic construct
  misc_feature 1..69: note = Synthetic: 2558_ChineseTreeShrewMod_diMut_GT8AC_n1
  source 1..69: mol_type = other DNA
ggaggctactggtgaatattaaccaaggtcacctcagttatcggaggagcaaacaagggctaagtccac

SEQ ID NO: 1159 - DNA, 69 bp, synthetic construct
  misc_feature 1..69: note = Synthetic: 2559_ChineseTreeShrewMod_diMut_GT8AG_n1
  source 1..69: mol_type = other DNA
ggaggctagtggtgaatattaaccaaggtcacctcagttatcggaggagcaaacaagggctaagtccac

SEQ ID NO: 1160 - DNA, 69 bp, synthetic construct
  misc_feature 1..69: note = Synthetic: 2560_ChineseTreeShrewMod_diMut_GT8CA_n1
  source 1..69: mol_type = other DNA
ggaggctcatggtgaatattaaccaaggtcacctcagttatcggaggagcaaacaagggctaagtccac

SEQ ID NO: 1161 - DNA, 69 bp, synthetic construct
  misc_feature 1..69: note = Synthetic: 2561_ChineseTreeShrewMod_diMut_GT8CC_n1
  source 1..69: mol_type = other DNA
ggaggctcctggtgaatattaaccaaggtcacctcagttatcggaggagcaaacaagggctaagtccac

SEQ ID NO: 1162 - DNA, 69 bp, synthetic construct
  misc_feature 1..69: note = Synthetic: 2563_ChineseTreeShrewMod_diMut_GT8TA_n1
  source 1..69: mol_type = other DNA
ggaggcttatggtgaatattaaccaaggtcacctcagttatcggaggagcaaacaagggctaagtccac

SEQ ID NO: 1163 - DNA, 69 bp, synthetic construct
  misc_feature 1..69: note = Synthetic: 2564_ChineseTreeShrewMod_diMut_GT8TC_n1
  source 1..69: mol_type = other DNA
ggaggcttctggtgaatattaaccaaggtcacctcagttatcggaggagcaaacaagggctaagtccac

SEQ ID NO: 1164 - DNA, 69 bp, synthetic construct
  misc_feature 1..69: note = Synthetic: 2566_ChineseTreeShrewMod_diMut_TT9AA_n1
  source 1..69: mol_type = other DNA
ggaggctgaaggtgaatattaaccaaggtcacctcagttatcggaggagcaaacaagggctaagtccac

SEQ ID NO: 1165 - DNA, 69 bp, synthetic construct
  misc_feature 1..69: note = Synthetic: 2567_ChineseTreeShrewMod_diMut_TT9AC_n1
  source 1..69: mol_type = other DNA
ggaggctgacggtgaatattaaccaaggtcacctcagttatcggaggagcaaacaagggctaagtccac

SEQ ID NO: 1166 - DNA, 69 bp, synthetic construct
  misc_feature 1..69: note = Synthetic: 2568_ChineseTreeShrewMod_diMut_TT9AG_n1
  source 1..69: mol_type = other DNA
ggaggctgagggtgaatattaaccaaggtcacctcagttatcggaggagcaaacaagggctaagtccac

SEQ ID NO: 1167 - DNA, 69 bp, synthetic construct
  misc_feature 1..69: note = Synthetic: 2574_ChineseTreeShrewMod_diMut_TT9GG_n1
  source 1..69: mol_type = other DNA
ggaggctgggggtgaatattaaccaaggtcacctcagttatcggaggagcaaacaagggctaagtccac

SEQ ID NO: 1168 - DNA, 69 bp, synthetic construct
  misc_feature 1..69: note = Synthetic: 2575_ChineseTreeShrewMod_diMut_TG10AA_n1
  source 1..69: mol_type = other DNA
ggaggctgtaagtgaatattaaccaaggtcacctcagttatcggaggagcaaacaagggctaagtccac

SEQ ID NO: 1169 - DNA, 69 bp, synthetic construct
  misc_feature 1..69: note = Synthetic: 2580_ChineseTreeShrewMod_diMut_TG10CT_n1
  source 1..69: mol_type = other DNA
ggaggctgtctgtgaatattaaccaaggtcacctcagttatcggaggagcaaacaagggctaagtccac

SEQ ID NO: 1170 - DNA, 69 bp, synthetic construct
  misc_feature 1..69: note = Synthetic: 2582_ChineseTreeShrewMod_diMut_TG10GC_n1
  source 1..69: mol_type = other DNA
ggaggctgtgcgtgaatattaaccaaggtcacctcagttatcggaggagcaaacaagggctaagtccac

SEQ ID NO: 1171 - DNA, 69 bp, synthetic construct
  misc_feature 1..69: note = Synthetic: 2586_ChineseTreeShrewMod_diMut_GG11AT_n1
  source 1..69: mol_type = other DNA
ggaggctgttattgaatattaaccaaggtcacctcagttatcggaggagcaaacaagggctaagtccac

SEQ ID NO: 1172 - DNA, 69 bp, synthetic construct
  misc_feature 1..69: note = Synthetic: 2591_ChineseTreeShrewMod_diMut_GG11TC_n1
  source 1..69: mol_type = other DNA
ggaggctgtttctgaatattaaccaaggtcacctcagttatcggaggagcaaacaagggctaagtccac

SEQ ID NO: 1173 - DNA, 69 bp, synthetic construct
  misc_feature 1..69: note = Synthetic: 2596_ChineseTreeShrewMod_diMut_GT12CA_n1
  source 1..69: mol_type = other DNA
ggaggctgttgcagaatattaaccaaggtcacctcagttatcggaggagcaaacaagggctaagtccac

SEQ ID NO: 1174 - DNA, 69 bp, synthetic construct
  misc_feature 1..69: note = Synthetic: 2597_ChineseTreeShrewMod_diMut_GT12CC_n1
  source 1..69: mol_type = other DNA
ggaggctgttgccgaatattaaccaaggtcacctcagttatcggaggagcaaacaagggctaagtccac

SEQ ID NO: 1175 - DNA, 69 bp, synthetic construct
  misc_feature 1..69: note = Synthetic: 2599_ChineseTreeShrewMod_diMut_GT12TA_n1
  source 1..69: mol_type = other DNA
ggaggctgttgtagaatattaaccaaggtcacctcagttatcggaggagcaaacaagggctaagtccac

SEQ ID NO: 1176 - DNA, 69 bp, synthetic construct
  misc_feature 1..69: note = Synthetic: 2600_ChineseTreeShrewMod_diMut_GT12TC_n1
  source 1..69: mol_type = other DNA
ggaggctgttgtcgaatattaaccaaggtcacctcagttatcggaggagcaaacaagggctaagtccac

SEQ ID NO: 1177 - DNA, 69 bp, synthetic construct
  misc_feature 1..69: note = Synthetic: 2601_ChineseTreeShrewMod_diMut_GT12TG_n1
  source 1..69: mol_type = other DNA
ggaggctgttgtggaatattaaccaaggtcacctcagttatcggaggagcaaacaagggctaagtccac

SEQ ID NO: 1178 - DNA, 69 bp, synthetic construct
  misc_feature 1..69: note = Synthetic: 2602_ChineseTreeShrewMod_diMut_TG13AA_n1
  source 1..69: mol_type = other DNA
ggaggctgttggaaaatattaaccaaggtcacctcagttatcggaggagcaaacaagggctaagtccac

SEQ ID NO: 1179 - DNA, 69 bp, synthetic construct
  misc_feature 1..69: note = Synthetic: 2603_ChineseTreeShrewMod_diMut_TG13AC_n1
  source 1..69: mol_type = other DNA
ggaggctgttggacaatattaaccaaggtcacctcagttatcggaggagcaaacaagggctaagtccac

SEQ ID NO: 1180 - DNA, 69 bp, synthetic construct
  misc_feature 1..69: note = Synthetic: 2605_ChineseTreeShrewMod_diMut_TG13CA_n1
  source 1..69: mol_type = other DNA
ggaggctgttggcaaatattaaccaaggtcacctcagttatcggaggagcaaacaagggctaagtccac

SEQ ID NO: 1181 - DNA, 69 bp, synthetic construct
  misc_feature 1..69: note = Synthetic: 2606_ChineseTreeShrewMod_diMut_TG13CC_n1
  source 1..69: mol_type = other DNA
ggaggctgttggccaatattaaccaaggtcacctcagttatcggaggagcaaacaagggctaagtccac

SEQ ID NO: 1182 - DNA, 69 bp, synthetic construct
  misc_feature 1..69: note = Synthetic: 2608_ChineseTreeShrewMod_diMut_TG13GA_n1
  source 1..69: mol_type = other DNA
ggaggctgttgggaaatattaaccaaggtcacctcagttatcggaggagcaaacaagggctaagtccac

SEQ ID NO: 1183 - DNA, 69 bp, synthetic construct
  misc_feature 1..69: note = Synthetic: 2609_ChineseTreeShrewMod_diMut_TG13GC_n1
  source 1..69: mol_type = other DNA
ggaggctgttgggcaatattaaccaaggtcacctcagttatcggaggagcaaacaagggctaagtccac

SEQ ID NO: 1184 - DNA, 69 bp, synthetic construct
  misc_feature 1..69: note = Synthetic: 2610_ChineseTreeShrewMod_diMut_TG13GT_n1
  source 1..69: mol_type = other DNA
ggaggctgttgggtaatattaaccaaggtcacctcagttatcggaggagcaaacaagggctaagtccac

SEQ ID NO: 1185 - DNA, 69 bp, synthetic construct
  misc_feature 1..69: note = Synthetic: 2611_ChineseTreeShrewMod_diMut_GA14AC_n1
  source 1..69: mol_type = other DNA
ggaggctgttggtacatattaaccaaggtcacctcagttatcggaggagcaaacaagggctaagtccac

SEQ ID NO: 1186 - DNA, 69 bp, synthetic construct
  misc_feature 1..69: note = Synthetic: 2614_ChineseTreeShrewMod_diMut_GA14CC_n1
  source 1..69: mol_type = other DNA
ggaggctgttggtccatattaaccaaggtcacctcagttatcggaggagcaaacaagggctaagtccac

SEQ ID NO: 1187 - DNA, 69 bp, synthetic construct
  misc_feature 1..69: note = Synthetic: 2615_ChineseTreeShrewMod_diMut_GA14CG_n1
  source 1..69: mol_type = other DNA
ggaggctgttggtcgatattaaccaaggtcacctcagttatcggaggagcaaacaagggctaagtccac

SEQ ID NO: 1188 - DNA, 69 bp, synthetic construct
  misc_feature 1..69: note = Synthetic: 2623_ChineseTreeShrewMod_diMut_AA15GC_n1
  source 1..69: mol_type = other DNA
ggaggctgttggtggctattaaccaaggtcacctcagttatcggaggagcaaacaagggctaagtccac

SEQ ID NO: 1189 - DNA, 69 bp, synthetic construct
  misc_feature 1..69: note = Synthetic: 2626_ChineseTreeShrewMod_diMut_AA15TC_n1
  source 1..69: mol_type = other DNA
ggaggctgttggtgtctattaaccaaggtcacctcagttatcggaggagcaaacaagggctaagtccac

SEQ ID NO: 1190 - DNA, 69 bp, synthetic construct
  misc_feature 1..69: note = Synthetic: 2628_ChineseTreeShrewMod_diMut_AA15TT_n1
  source 1..69: mol_type = other DNA
ggaggctgttggtgtttattaaccaaggtcacctcagttatcggaggagcaaacaagggctaagtccac

SEQ ID NO: 1191 - DNA, 69 bp, synthetic construct
  misc_feature 1..69: note = Synthetic: 2629_ChineseTreeShrewMod_diMut_AT16CA_n1
  source 1..69: mol_type = other DNA
ggaggctgttggtgacaattaaccaaggtcacctcagttatcggaggagcaaacaagggctaagtccac

SEQ ID NO: 1192 - DNA, 69 bp, synthetic construct
  misc_feature 1..69: note = Synthetic: 2633_ChineseTreeShrewMod_diMut_AT16GC_n1
  source 1..69: mol_type = other DNA
ggaggctgttggtgagcattaaccaaggtcacctcagttatcggaggagcaaacaagggctaagtccac

SEQ ID NO: 1193 - DNA, 69 bp, synthetic construct
  misc_feature 1..69: note = Synthetic: 2635_ChineseTreeShrewMod_diMut_AT16TA_n1
  source 1..69: mol_type = other DNA
ggaggctgttggtgataattaaccaaggtcacctcagttatcggaggagcaaacaagggctaagtccac

SEQ ID NO: 1194 - DNA, 69 bp, synthetic construct
  misc_feature 1..69: note = Synthetic: 2636_ChineseTreeShrewMod_diMut_AT16TC_n1
  source 1..69: mol_type = other DNA
ggaggctgttggtgatcattaaccaaggtcacctcagttatcggaggagcaaacaagggctaagtccac

SEQ ID NO: 1195 - DNA, 69 bp, synthetic construct
  misc_feature 1..69: note = Synthetic: 2640_ChineseTreeShrewMod_diMut_TA17AT_n1
  source 1..69: mol_type = other DNA
ggaggctgttggtgaaatttaaccaaggtcacctcagttatcggaggagcaaacaagggctaagtccac

SEQ ID NO: 1196 - DNA, 69 bp, synthetic construct
  misc_feature 1..69: note = Synthetic: 2643_ChineseTreeShrewMod_diMut_TA17CT_n1
  source 1..69: mol_type = other DNA
ggaggctgttggtgaactttaaccaaggtcacctcagttatcggaggagcaaacaagggctaagtccac

SEQ ID NO: 1197 - DNA, 69 bp, synthetic construct
  misc_feature 1..69: note = Synthetic: 2644_ChineseTreeShrewMod_diMut_TA17GC_n1
  source 1..69: mol_type = other DNA
ggaggctgttggtgaagcttaaccaaggtcacctcagttatcggaggagcaaacaagggctaagtccac

SEQ ID NO: 1198 - DNA, 69 bp, synthetic construct
  misc_feature 1..69: note = Synthetic: 2646_ChineseTreeShrewMod_diMut_TA17GT_n1
  source 1..69: mol_type = other DNA
ggaggctgttggtgaagtttaaccaaggtcacctcagttatcggaggagcaaacaagggctaagtccac

SEQ ID NO: 1199 - DNA, 69 bp, synthetic construct
  misc_feature 1..69: note = Synthetic: 2647_ChineseTreeShrewMod_diMut_AT18CA_n1
  source 1..69: mol_type = other DNA
ggaggctgttggtgaatcataaccaaggtcacctcagttatcggaggagcaaacaagggctaagtccac

SEQ ID NO: 1200 - DNA, 69 bp, synthetic construct
  misc_feature 1..69: note = Synthetic: 2651_ChineseTreeShrewMod_diMut_AT18GC_n1
  source 1..69: mol_type = other DNA
ggaggctgttggtgaatgctaaccaaggtcacctcagttatcggaggagcaaacaagggctaagtccac

SEQ ID NO: 1201 - DNA, 69 bp, synthetic construct
  misc_feature 1..69: note = Synthetic: 2653_ChineseTreeShrewMod_diMut_AT18TA_n1
  source 1..69: mol_type = other DNA
ggaggctgttggtgaattataaccaaggtcacctcagttatcggaggagcaaacaagggctaagtccac

SEQ ID NO: 1202 - DNA, 69 bp, synthetic construct
  misc_feature 1..69: note = Synthetic: 2654_ChineseTreeShrewMod_diMut_AT18TC_n1
  source 1..69: mol_type = other DNA
ggaggctgttggtgaattctaaccaaggtcacctcagttatcggaggagcaaacaagggctaagtccac

SEQ ID NO: 1203 - DNA, 69 bp, synthetic construct
  misc_feature 1..69: note = Synthetic: 2664_ChineseTreeShrewMod_diMut_TT19GG_n1
  source 1..69: mol_type = other DNA
ggaggctgttggtgaataggaaccaaggtcacctcagttatcggaggagcaaacaagggctaagtccac

SEQ ID NO: 1204 - DNA, 69 bp, synthetic construct
  misc_feature 1..69: note = Synthetic: 2672_ChineseTreeShrewMod_diMut_TA20GG_n1
  source 1..69: mol_type = other DNA
ggaggctgttggtgaatatggaccaaggtcacctcagttatcggaggagcaaacaagggctaagtccac

SEQ ID NO: 1205 - DNA, 69 bp, synthetic construct
  misc_feature 1..69: note = Synthetic: 2678_ChineseTreeShrewMod_diMut_AA21GG_n1
  source 1..69: mol_type = other DNA
ggaggctgttggtgaatattggccaaggtcacctcagttatcggaggagcaaacaagggctaagtccac

SEQ ID NO: 1206 - DNA, 69 bp, synthetic construct
  misc_feature 1..69: note = Synthetic: 2679_ChineseTreeShrewMod_diMut_AA21GT_n1
  source 1..69: mol_type = other DNA
ggaggctgttggtgaatattgtccaaggtcacctcagttatcggaggagcaaacaagggctaagtccac

SEQ ID NO: 1207 - DNA, 69 bp, synthetic construct
  misc_feature 1..69: note = Synthetic: 2685_ChineseTreeShrewMod_diMut_AC22CT_n1
  source 1..69: mol_type = other DNA
ggaggctgttggtgaatattactcaaggtcacctcagttatcggaggagcaaacaagggctaagtccac

SEQ ID NO: 1208 - DNA, 69 bp, synthetic construct
  misc_feature 1..69: note = Synthetic: 2707_ChineseTreeShrewMod_diMut_CA24TC_n1
  source 1..69: mol_type = other DNA
ggaggctgttggtgaatattaactcaggtcacctcagttatcggaggagcaaacaagggctaagtccac

SEQ ID NO: 1209 - DNA, 69 bp, synthetic construct
  misc_feature 1..69: note = Synthetic: 2714_ChineseTreeShrewMod_diMut_AA25GG_n1
  source 1..69: mol_type = other DNA
ggaggctgttggtgaatattaaccggggtcacctcagttatcggaggagcaaacaagggctaagtccac

SEQ ID NO: 1210 - DNA, 69 bp, synthetic construct
  misc_feature 1..69: note = Synthetic: 2717_ChineseTreeShrewMod_diMut_AA25TG_n1
  source 1..69: mol_type = other DNA
ggaggctgttggtgaatattaacctgggtcacctcagttatcggaggagcaaacaagggctaagtccac

SEQ ID NO: 1211 - DNA, 69 bp, synthetic construct
  misc_feature 1..69: note = Synthetic: 2728_ChineseTreeShrewMod_diMut_GG27AA_n1
  source 1..69: mol_type = other DNA
ggaggctgttggtgaatattaaccaaaatcacctcagttatcggaggagcaaacaagggctaagtccac

SEQ ID NO: 1212 - DNA, 69 bp, synthetic construct
  misc_feature 1..69: note = Synthetic: 2734_ChineseTreeShrewMod_diMut_GG27TA_n1
  source 1..69: mol_type = other DNA
ggaggctgttggtgaatattaaccaatatcacctcagttatcggaggagcaaacaagggctaagtccac

SEQ ID NO: 1213 - DNA, 69 bp, synthetic construct
  misc_feature 1..69: note = Synthetic: 2743_ChineseTreeShrewMod_diMut_GT28TA_n1
  source 1..69: mol_type = other DNA
ggaggctgttggtgaatattaaccaagtacacctcagttatcggaggagcaaacaagggctaagtccac

SEQ ID NO: 1214 - DNA, 69 bp, synthetic construct
  misc_feature 1..69: note = Synthetic: 2748_ChineseTreeShrewMod_diMut_TC29AT_n1
  source 1..69: mol_type = other DNA
ggaggctgttggtgaatattaaccaaggatacctcagttatcggaggagcaaacaagggctaagtccac

SEQ ID NO: 1215 - DNA, 69 bp, synthetic construct
  misc_feature 1..69: note = Synthetic: 2750_ChineseTreeShrewMod_diMut_TC29CG_n1
  source 1..69: mol_type = other DNA
ggaggctgttggtgaatattaaccaaggcgacctcagttatcggaggagcaaacaagggctaagtccac

SEQ ID NO: 1216 - DNA, 69 bp, synthetic construct
  misc_feature 1..69: note = Synthetic: 2753_ChineseTreeShrewMod_diMut_TC29GG_n1
  source 1..69: mol_type = other DNA
ggaggctgttggtgaatattaaccaaggggacctcagttatcggaggagcaaacaagggctaagtccac

SEQ ID NO: 1217 - DNA, 69 bp, synthetic construct
  misc_feature 1..69: note = Synthetic: 2754_ChineseTreeShrewMod_diMut_TC29GT_n1
  source 1..69: mol_type = other DNA
ggaggctgttggtgaatattaaccaagggtacctcagttatcggaggagcaaacaagggctaagtccac

SEQ ID NO: 1218 - DNA, 69 bp, synthetic construct
  misc_feature 1..69: note = Synthetic: 2756_ChineseTreeShrewMod_diMut_CA30AG_n1
  source 1..69: mol_type = other DNA
ggaggctgttggtgaatattaaccaaggtagcctcagttatcggaggagcaaacaagggctaagtccac

SEQ ID NO: 1219 - DNA, 69 bp, synthetic construct
  misc_feature 1..69: note = Synthetic: 2758_ChineseTreeShrewMod_diMut_CA30GC_n1
  source 1..69: mol_type = other DNA
ggaggctgttggtgaatattaaccaaggtgccctcagttatcggaggagcaaacaagggctaagtccac

SEQ ID NO: 1220 - DNA, 69 bp, synthetic construct
  misc_feature 1..69: note = Synthetic: 2759_ChineseTreeShrewMod_diMut_CA30GG_n1
  source 1..69: mol_type = other DNA
ggaggctgttggtgaatattaaccaaggtggcctcagttatcggaggagcaaacaagggctaagtccac

SEQ ID NO: 1221 - DNA, 69 bp, synthetic construct
  misc_feature 1..69: note = Synthetic: 2763_ChineseTreeShrewMod_diMut_CA30TT_n1
  source 1..69: mol_type = other DNA
ggaggctgttggtgaatattaaccaaggtttcctcagttatcggaggagcaaacaagggctaagtccac

SEQ ID NO: 1222 - DNA, 69 bp, synthetic construct
  misc_feature 1..69: note = Synthetic: 2768_ChineseTreeShrewMod_diMut_AC31GG_n1
  source 1..69: mol_type = other DNA
ggaggctgttggtgaatattaaccaaggtcggctcagttatcggaggagcaaacaagggctaagtccac

SEQ ID NO: 1223 - DNA, 69 bp, synthetic construct
  misc_feature 1..69: note = Synthetic: 2769_ChineseTreeShrewMod_diMut_AC31GT_n1
  source 1..69: mol_type = other DNA
ggaggctgttggtgaatattaaccaaggtcgtctcagttatcggaggagcaaacaagggctaagtccac

SEQ ID NO: 1224 - DNA, 69 bp, synthetic construct
  misc_feature 1..69: note = Synthetic: 2770_ChineseTreeShrewMod_diMut_AC31TA_n1
  source 1..69: mol_type = other DNA
ggaggctgttggtgaatattaaccaaggtctactcagttatcggaggagcaaacaagggctaagtccac

SEQ ID NO: 1225 - DNA, 69 bp, synthetic construct
  misc_feature 1..69: note = Synthetic: 2771_ChineseTreeShrewMod_diMut_AC31TG_n1
  source 1..69: mol_type = other DNA
ggaggctgttggtgaatattaaccaaggtctgctcagttatcggaggagcaaacaagggctaagtccac

SEQ ID NO: 1226 - DNA, 69 bp, synthetic construct
  misc_feature 1..69: note = Synthetic: 2773_ChineseTreeShrewMod_diMut_CC32AA_n1
  source 1..69: mol_type = other DNA
ggaggctgttggtgaatattaaccaaggtcaaatcagttatcggaggagcaaacaagggctaagtccac

SEQ ID NO: 1227 - DNA, 69 bp, synthetic construct
  misc_feature 1..69: note = Synthetic: 2774_ChineseTreeShrewMod_diMut_CC32AG_n1
  source 1..69: mol_type = other DNA
ggaggctgttggtgaatattaaccaaggtcaagtcagttatcggaggagcaaacaagggctaagtccac

SEQ ID NO: 1228 - DNA, 69 bp, synthetic construct
  misc_feature 1..69: note = Synthetic: 2778_ChineseTreeShrewMod_diMut_CC32GT_n1
  source 1..69: mol_type = other DNA
ggaggctgttggtgaatattaaccaaggtcagttcagttatcggaggagcaaacaagggctaagtccac

SEQ ID NO: 1229 - DNA, 69 bp, synthetic construct
  misc_feature 1..69: note = Synthetic: 2779_ChineseTreeShrewMod_diMut_CC32TA_n1
  source 1..69: mol_type = other DNA
ggaggctgttggtgaatattaaccaaggtcatatcagttatcggaggagcaaacaagggctaagtccac

SEQ ID NO: 1230 - DNA, 69 bp, synthetic construct
  misc_feature 1..69: note = Synthetic: 2780_ChineseTreeShrewMod_diMut_CC32TG_n1
  source 1..69: mol_type = other DNA
ggaggctgttggtgaatattaaccaaggtcatgtcagttatcggaggagcaaacaagggctaagtccac

SEQ ID NO: 1231 - DNA, 69 bp, synthetic construct
  misc_feature 1..69: note = Synthetic: 2781_ChineseTreeShrewMod_diMut_CC32TT_n1
  source 1..69: mol_type = other DNA
ggaggctgttggtgaatattaaccaaggtcatttcagttatcggaggagcaaacaagggctaagtccac

SEQ ID NO: 1232 - DNA, 69 bp, synthetic construct
  misc_feature 1..69: note = Synthetic: 2782_ChineseTreeShrewMod_diMut_CT33AA_n1
  source 1..69: mol_type = other DNA
ggaggctgttggtgaatattaaccaaggtcacaacagttatcggaggagcaaacaagggctaagtccac

SEQ ID NO: 1233 - DNA, 69 bp, synthetic construct
  misc_feature 1..69: note = Synthetic: 2783_ChineseTreeShrewMod_diMut_CT33AC_n1
  source 1..69: mol_type = other DNA
ggaggctgttggtgaatattaaccaaggtcacaccagttatcggaggagcaaacaagggctaagtccac

SEQ ID NO: 1234 - DNA, 69 bp, synthetic construct
  misc_feature 1..69: note = Synthetic: 2784_ChineseTreeShrewMod_diMut_CT33AG_n1
  source 1..69: mol_type = other DNA
ggaggctgttggtgaatattaaccaaggtcacagcagttatcggaggagcaaacaagggctaagtccac

SEQ ID NO: 1235 - DNA, 69 bp, synthetic construct
  misc_feature 1..69: note = Synthetic: 2785_ChineseTreeShrewMod_diMut_CT33GA_n1
  source 1..69: mol_type = other DNA
ggaggctgttggtgaatattaaccaaggtcacgacagttatcggaggagcaaacaagggctaagtccac

SEQ ID NO: 1236 - DNA, 69 bp, synthetic construct
  misc_feature 1..69: note = Synthetic: 2786_ChineseTreeShrewMod_diMut_CT33GC_n1
  source 1..69: mol_type = other DNA
ggaggctgttggtgaatattaaccaaggtcacgccagttatcggaggagcaaacaagggctaagtccac

SEQ ID NO: 1237 - DNA, 69 bp, synthetic construct
  misc_feature 1..69: note = Synthetic: 2789_ChineseTreeShrewMod_diMut_CT33TC_n1
  source 1..69: mol_type = other DNA
ggaggctgttggtgaatattaaccaaggtcactccagttatcggaggagcaaacaagggctaagtccac

SEQ ID NO: 1238 - DNA, 69 bp, synthetic construct
  misc_feature 1..69: note = Synthetic: 2791_ChineseTreeShrewMod_diMut_TC34AA_n1
  source 1..69: mol_type = other DNA
ggaggctgttggtgaatattaaccaaggtcaccaaagttatcggaggagcaaacaagggctaagtccac

SEQ ID NO: 1239 - DNA, 69 bp, synthetic construct
  misc_feature 1..69: note = Synthetic: 2792_ChineseTreeShrewMod_diMut_TC34AG_n1
  source 1..69: mol_type = other DNA
ggaggctgttggtgaatattaaccaaggtcaccagagttatcggaggagcaaacaagggctaagtccac

SEQ ID NO: 1240 - DNA, 69 bp, synthetic construct
  misc_feature 1..69: note = Synthetic: 2793_ChineseTreeShrewMod_diMut_TC34AT_n1
  source 1..69: mol_type = other DNA
ggaggctgttggtgaatattaaccaaggtcaccatagttatcggaggagcaaacaagggctaagtccac

SEQ ID NO: 1241 - DNA, 69 bp, synthetic construct
  misc_feature 1..69: note = Synthetic: 2798_ChineseTreeShrewMod_diMut_TC34GG_n1
  source 1..69: mol_type = other DNA
ggaggctgttggtgaatattaaccaaggtcaccggagttatcggaggagcaaacaagggctaagtccac

SEQ ID NO: 1242 - DNA, 69 bp, synthetic construct
  misc_feature 1..69: note = Synthetic: 2799_ChineseTreeShrewMod_diMut_TC34GT_n1
  source 1..69: mol_type = other DNA
ggaggctgttggtgaatattaaccaaggtcaccgtagttatcggaggagcaaacaagggctaagtccac

SEQ ID NO: 1243 - DNA, 69 bp, synthetic construct
  misc_feature 1..69: note = Synthetic: 2800_ChineseTreeShrewMod_diMut_CA35AC_n1
  source 1..69: mol_type = other DNA
ggaggctgttggtgaatattaaccaaggtcacctacgttatcggaggagcaaacaagggctaagtccac

SEQ ID NO: 1244 - DNA, 69 bp, synthetic construct
  misc_feature 1..69: note = Synthetic: 2801_ChineseTreeShrewMod_diMut_CA35AG_n1
  source 1..69: mol_type = other DNA
ggaggctgttggtgaatattaaccaaggtcacctaggttatcggaggagcaaacaagggctaagtccac

SEQ ID NO: 1245 - DNA, 69 bp, synthetic construct
  misc_feature 1..69: note = Synthetic: 2802_ChineseTreeShrewMod_diMut_CA35AT_n1
  source 1..69: mol_type = other DNA
ggaggctgttggtgaatattaaccaaggtcacctatgttatcggaggagcaaacaagggctaagtccac

SEQ ID NO: 1246 - DNA, 69 bp, synthetic construct
  misc_feature 1..69: note = Synthetic: 2803_ChineseTreeShrewMod_diMut_CA35GC_n1
  source 1..69: mol_type = other DNA
ggaggctgttggtgaatattaaccaaggtcacctgcgttatcggaggagcaaacaagggctaagtccac

SEQ ID NO: 1247 - DNA, 69 bp, synthetic construct
  misc_feature 1..69: note = Synthetic: 2804_ChineseTreeShrewMod_diMut_CA35GG_n1
  source 1..69: mol_type = other DNA
ggaggctgttggtgaatattaaccaaggtcacctgggttatcggaggagcaaacaagggctaagtccac

SEQ ID NO: 1248 - DNA, 69 bp, synthetic construct
  misc_feature 1..69: note = Synthetic: 2808_ChineseTreeShrewMod_diMut_CA35TT_n1
  source 1..69: mol_type = other DNA
ggaggctgttggtgaatattaaccaaggtcacctttgttatcggaggagcaaacaagggctaagtccac

SEQ ID NO: 1249 - DNA, 69 bp, synthetic construct
  misc_feature 1..69: note = Synthetic: 2810_ChineseTreeShrewMod_diMut_AG36CC_n1
  source 1..69: mol_type = other DNA
ggaggctgttggtgaatattaaccaaggtcacctcccttatcggaggagcaaacaagggctaagtccac

SEQ ID NO: 1250 - DNA, 69 bp, synthetic construct
  misc_feature 1..69: note = Synthetic: 2811_ChineseTreeShrewMod_diMut_AG36CT_n1
  source 1..69: mol_type = other DNA
ggaggctgttggtgaatattaaccaaggtcacctcctttatcggaggagcaaacaagggctaagtccac

SEQ ID NO: 1251 - DNA, 69 bp, synthetic construct
  misc_feature 1..69: note = Synthetic: 2813_ChineseTreeShrewMod_diMut_AG36GC_n1
  source 1..69: mol_type = other DNA
ggaggctgttggtgaatattaaccaaggtcacctcgcttatcggaggagcaaacaagggctaagtccac

SEQ ID NO: 1252 - DNA, 69 bp, synthetic construct
  misc_feature 1..69: note = Synthetic: 2814_ChineseTreeShrewMod_diMut_AG36GT_n1
  source 1..69: mol_type = other DNA
ggaggctgttggtgaatattaaccaaggtcacctcgtttatcggaggagcaaacaagggctaagtccac

SEQ ID NO: 1253 - DNA, 69 bp, synthetic construct
  misc_feature 1..69: note = Synthetic: 2815_ChineseTreeShrewMod_diMut_AG36TA_n1
  source 1..69: mol_type = other DNA
ggaggctgttggtgaatattaaccaaggtcacctctattatcggaggagcaaacaagggctaagtccac

SEQ ID NO: 1254 - DNA, 69 bp, synthetic construct
  misc_feature 1..69: note = Synthetic: 2816_ChineseTreeShrewMod_diMut_AG36TC_n1
  source 1..69: mol_type = other DNA
ggaggctgttggtgaatattaaccaaggtcacctctcttatcggaggagcaaacaagggctaagtccac

SEQ ID NO: 1255 - DNA, 69 bp, synthetic construct
  misc_feature 1..69: note = Synthetic: 2820_ChineseTreeShrewMod_diMut_GT37AG_n1
  source 1..69: mol_type = other DNA
ggaggctgttggtgaatattaaccaaggtcacctcaagtatcggaggagcaaacaagggctaagtccac

SEQ ID NO: 1256 - DNA, 69 bp, synthetic construct
  misc_feature 1..69: note = Synthetic: 2821_ChineseTreeShrewMod_diMut_GT37CA_n1
  source 1..69: mol_type = other DNA
ggaggctgttggtgaatattaaccaaggtcacctcacatatcggaggagcaaacaagggctaagtccac

SEQ ID NO: 1257 - DNA, 69 bp, synthetic construct
  misc_feature 1..69: note = Synthetic: 2825_ChineseTreeShrewMod_diMut_GT37TC_n1
  source 1..69: mol_type = other DNA
ggaggctgttggtgaatattaaccaaggtcacctcatctatcggaggagcaaacaagggctaagtccac

SEQ ID NO: 1258 - DNA, 69 bp, synthetic construct
  misc_feature 1..69: note = Synthetic: 2831_ChineseTreeShrewMod_diMut_TT38CC_n1
  source 1..69: mol_type = other DNA
ggaggctgttggtgaatattaaccaaggtcacctcagccatcggaggagcaaacaagggctaagtccac

SEQ ID NO: 1259 - DNA, 69 bp, synthetic construct
  misc_feature 1..69: note = Synthetic: 2832_ChineseTreeShrewMod_diMut_TT38CG_n1
  source 1..69: mol_type = other DNA
ggaggctgttggtgaatattaaccaaggtcacctcagcgatcggaggagcaaacaagggctaagtccac

SEQ ID NO: 1260 - DNA, 69 bp, synthetic construct
  misc_feature 1..69: note = Synthetic: 2833_ChineseTreeShrewMod_diMut_TT38GA_n1
  source 1..69: mol_type = other DNA
ggaggctgttggtgaatattaaccaaggtcacctcaggaatcggaggagcaaacaagggctaagtccac

SEQ ID NO: 1261 - DNA, 69 bp, synthetic construct
  misc_feature 1..69: note = Synthetic: 2834_ChineseTreeShrewMod_diMut_TT38GC_n1
  source 1..69: mol_type = other DNA
ggaggctgttggtgaatattaaccaaggtcacctcaggcatcggaggagcaaacaagggctaagtccac

SEQ ID NO: 1262 - DNA, 69 bp, synthetic construct
  misc_feature 1..69: note = Synthetic: 2836_ChineseTreeShrewMod_diMut_TA39AC_n1
  source 1..69: mol_type = other DNA
ggaggctgttggtgaatattaaccaaggtcacctcagtactcggaggagcaaacaagggctaagtccac

SEQ ID NO: 1263 - DNA, 69 bp, synthetic construct
  misc_feature 1..69: note = Synthetic: 2837_ChineseTreeShrewMod_diMut_TA39AG_n1
  source 1..69: mol_type = other DNA
ggaggctgttggtgaatattaaccaaggtcacctcagtagtcggaggagcaaacaagggctaagtccac

SEQ ID NO: 1264 - DNA, 69 bp, synthetic construct
  misc_feature 1..69: note = Synthetic: 2838_ChineseTreeShrewMod_diMut_TA39AT_n1
  source 1..69: mol_type = other DNA
ggaggctgttggtgaatattaaccaaggtcacctcagtattcggaggagcaaacaagggctaagtccac

SEQ ID NO: 1265 - DNA, 69 bp, synthetic construct
  misc_feature 1..69: note = Synthetic: 2843_ChineseTreeShrewMod_diMut_TA39GG_n1
  source 1..69: mol_type = other DNA
ggaggctgttggtgaatattaaccaaggtcacctcagtggtcggaggagcaaacaagggctaagtccac

SEQ ID NO: 1266 - DNA, 69 bp, synthetic construct
  misc_feature 1..69: note = Synthetic: 2846_ChineseTreeShrewMod_diMut_AT40CC_n1
  source 1..69: mol_type = other DNA
ggaggctgttggtgaatattaaccaaggtcacctcagttcccggaggagcaaacaagggctaagtccac

SEQ ID NO: 1267 - DNA, 69 bp, synthetic construct
  misc_feature 1..69: note = Synthetic: 2847_ChineseTreeShrewMod_diMut_AT40CG_n1
  source 1..69: mol_type = other DNA
ggaggctgttggtgaatattaaccaaggtcacctcagttcgcggaggagcaaacaagggctaagtccac

SEQ ID NO: 1268 - DNA, 69 bp, synthetic construct
  misc_feature 1..69: note = Synthetic: 2848_ChineseTreeShrewMod_diMut_AT40GA_n1
  source 1..69: mol_type = other DNA
ggaggctgttggtgaatattaaccaaggtcacctcagttgacggaggagcaaacaagggctaagtccac

SEQ ID NO: 1269 - DNA, 69 bp, synthetic construct
  misc_feature 1..69: note = Synthetic: 2849_ChineseTreeShrewMod_diMut_AT40GC_n1
  source 1..69: mol_type = other DNA
ggaggctgttggtgaatattaaccaaggtcacctcagttgccggaggagcaaacaagggctaagtccac

SEQ ID NO: 1270 - DNA, 69 bp, synthetic construct
  misc_feature 1..69: note = Synthetic: 2851_ChineseTreeShrewMod_diMut_AT40TA_n1
  source 1..69: mol_type = other DNA
ggaggctgttggtgaatattaaccaaggtcacctcagtttacggaggagcaaacaagggctaagtccac

SEQ ID NO: 1271 - DNA, 69 bp, synthetic construct
  misc_feature 1..69: note = Synthetic: 2852_ChineseTreeShrewMod_diMut_AT40TC_n1
  source 1..69: mol_type = other DNA
ggaggctgttggtgaatattaaccaaggtcacctcagtttccggaggagcaaacaagggctaagtccac

SEQ ID NO: 1272 - DNA, 69 bp, synthetic construct
  misc_feature 1..69: note = Synthetic: 2855_ChineseTreeShrewMod_diMut_TC41AG_n1
  source 1..69: mol_type = other DNA
ggaggctgttggtgaatattaaccaaggtcacctcagttaagggaggagcaaacaagggctaagtccac

SEQ ID NO: 1273 - DNA, 69 bp, synthetic construct
  misc_feature 1..69: note = Synthetic: 2858_ChineseTreeShrewMod_diMut_TC41CG_n1
  source 1..69: mol_type = other DNA
ggaggctgttggtgaatattaaccaaggtcacctcagttacgggaggagcaaacaagggctaagtccac

SEQ ID NO: 1274 - DNA, 69 bp, synthetic construct
  misc_feature 1..69: note = Synthetic: 2862_ChineseTreeShrewMod_diMut_TC41GT_n1
  source 1..69: mol_type = other DNA
ggaggctgttggtgaatattaaccaaggtcacctcagttagtggaggagcaaacaagggctaagtccac

SEQ ID NO: 1275 - DNA, 69 bp, synthetic construct
  misc_feature 1..69: note = Synthetic: 2864_ChineseTreeShrewMod_diMut_CG42AC_n1
  source 1..69: mol_type = other DNA
ggaggctgttggtgaatattaaccaaggtcacctcagttatacgaggagcaaacaagggctaagtccac

SEQ ID NO: 1276 - DNA, 69 bp, synthetic construct
  misc_feature 1..69: note = Synthetic: 2866_ChineseTreeShrewMod_diMut_CG42GA_n1
  source 1..69: mol_type = other DNA
ggaggctgttggtgaatattaaccaaggtcacctcagttatgagaggagcaaacaagggctaagtccac

SEQ ID NO: 1277 - DNA, 69 bp, synthetic construct
  misc_feature 1..69: note = Synthetic: 2867_ChineseTreeShrewMod_diMut_CG42GC_n1
  source 1..69: mol_type = other DNA
ggaggctgttggtgaatattaaccaaggtcacctcagttatgcgaggagcaaacaagggctaagtccac

SEQ ID NO: 1278 - DNA, 69 bp, synthetic construct
  misc_feature 1..69: note = Synthetic: 2868_ChineseTreeShrewMod_diMut_CG42GT_n1
  source 1..69: mol_type = other DNA
ggaggctgttggtgaatattaaccaaggtcacctcagttatgtgaggagcaaacaagggctaagtccac

SEQ ID NO: 1279 - DNA, 69 bp, synthetic construct
  misc_feature 1..69: note = Synthetic: 2869_ChineseTreeShrewMod_diMut_CG42TA_n1
  source 1..69: mol_type = other DNA
ggaggctgttggtgaatattaaccaaggtcacctcagttattagaggagcaaacaagggctaagtccac

SEQ ID NO: 1280 - DNA, 69 bp, synthetic construct
  misc_feature 1..69: note = Synthetic: 2870_ChineseTreeShrewMod_diMut_CG42TC_n1
  source 1..69: mol_type = other DNA
ggaggctgttggtgaatattaaccaaggtcacctcagttattcgaggagcaaacaagggctaagtccac

SEQ ID NO: 1281 - DNA, 69 bp, synthetic construct
  misc_feature 1..69: note = Synthetic: 2872_ChineseTreeShrewMod_diMut_GG43AA_n1
  source 1..69: mol_type = other DNA
ggaggctgttggtgaatattaaccaaggtcacctcagttatcaaaggagcaaacaagggctaagtccac

SEQ ID NO: 1282 - DNA, 69 bp, synthetic construct
  misc_feature 1..69: note = Synthetic: 2873_ChineseTreeShrewMod_diMut_GG43AC_n1
  source 1..69: mol_type = other DNA
ggaggctgttggtgaatattaaccaaggtcacctcagttatcacaggagcaaacaagggctaagtccac

SEQ ID NO: 1283 - DNA, 69 bp, synthetic construct
  misc_feature 1..69: note = Synthetic: 2874_ChineseTreeShrewMod_diMut_GG43AT_n1
  source 1..69: mol_type = other DNA
ggaggctgttggtgaatattaaccaaggtcacctcagttatcataggagcaaacaagggctaagtccac

SEQ ID NO: 1284 - DNA, 69 bp, synthetic construct
  misc_feature 1..69: note = Synthetic: 2879_ChineseTreeShrewMod_diMut_GG43TC_n1
  source 1..69: mol_type = other DNA
ggaggctgttggtgaatattaaccaaggtcacctcagttatctcaggagcaaacaagggctaagtccac

SEQ ID NO: 1285 - DNA, 69 bp, synthetic construct
  misc_feature 1..69: note = Synthetic: 2880_ChineseTreeShrewMod_diMut_GG43TT_n1
  source 1..69: mol_type = other DNA
ggaggctgttggtgaatattaaccaaggtcacctcagttatcttaggagcaaacaagggctaagtccac

SEQ ID NO: 1286 - DNA, 69 bp, synthetic construct
  misc_feature 1..69: note = Synthetic: 2882_ChineseTreeShrewMod_diMut_GA44AG_n1
  source 1..69: mol_type = other DNA
ggaggctgttggtgaatattaaccaaggtcacctcagttatcgagggagcaaacaagggctaagtccac

SEQ ID NO: 1287 - DNA, 69 bp, synthetic construct
  misc_feature 1..69: note = Synthetic: 2884_ChineseTreeShrewMod_diMut_GA44CC_n1
  source 1..69: mol_type = other DNA
ggaggctgttggtgaatattaaccaaggtcacctcagttatcgccggagcaaacaagggctaagtccac

SEQ ID NO: 1288 - DNA, 69 bp, synthetic construct
  misc_feature 1..69: note = Synthetic: 2886_ChineseTreeShrewMod_diMut_GA44CT_n1
  source 1..69: mol_type = other DNA
ggaggctgttggtgaatattaaccaaggtcacctcagttatcgctggagcaaacaagggctaagtccac

SEQ ID NO: 1289 - DNA, 69 bp, synthetic construct
  misc_feature 1..69: note = Synthetic: 2890_ChineseTreeShrewMod_diMut_AG45CA_n1
  source 1..69: mol_type = other DNA
ggaggctgttggtgaatattaaccaaggtcacctcagttatcggcagagcaaacaagggctaagtccac

SEQ ID NO: 1290 - DNA, 69 bp, synthetic construct
  misc_feature 1..69: note = Synthetic: 2891_ChineseTreeShrewMod_diMut_AG45CC_n1
  source 1..69: mol_type = other DNA
ggaggctgttggtgaatattaaccaaggtcacctcagttatcggccgagcaaacaagggctaagtccac

SEQ ID NO: 1291 - DNA, 69 bp, synthetic construct
  misc_feature 1..69: note = Synthetic: 2892_ChineseTreeShrewMod_diMut_AG45CT_n1
  source 1..69: mol_type = other DNA
ggaggctgttggtgaatattaaccaaggtcacctcagttatcggctgagcaaacaagggctaagtccac

SEQ ID NO: 1292 - DNA, 69 bp, synthetic construct
  misc_feature 1..69: note = Synthetic: 2893_ChineseTreeShrewMod_diMut_AG45GA_n1
  source 1..69: mol_type = other DNA
ggaggctgttggtgaatattaaccaaggtcacctcagttatcgggagagcaaacaagggctaagtccac

SEQ ID NO: 1293 - DNA, 69 bp, synthetic construct
  misc_feature 1..69: note = Synthetic: 2894_ChineseTreeShrewMod_diMut_AG45GC_n1
  source 1..69: mol_type = other DNA
ggaggctgttggtgaatattaaccaaggtcacctcagttatcgggcgagcaaacaagggctaagtccac

SEQ ID NO: 1294 - DNA, 69 bp, synthetic construct
  misc_feature 1..69: note = Synthetic: 2895_ChineseTreeShrewMod_diMut_AG45GT_n1
  source 1..69: mol_type = other DNA
ggaggctgttggtgaatattaaccaaggtcacctcagttatcgggtgagcaaacaagggctaagtccac

SEQ ID NO: 1295 - DNA, 69 bp, synthetic construct
  misc_feature 1..69: note = Synthetic: 2896_ChineseTreeShrewMod_diMut_AG45TA_n1
  source 1..69: mol_type = other DNA
ggaggctgttggtgaatattaaccaaggtcacctcagttatcggtagagcaaacaagggctaagtccac

SEQ ID NO: 1296 - DNA, 69 bp, synthetic construct
  misc_feature 1..69: note = Synthetic: 2897_ChineseTreeShrewMod_diMut_AG45TC_n1
  source 1..69: mol_type = other DNA
ggaggctgttggtgaatattaaccaaggtcacctcagttatcggtcgagcaaacaagggctaagtccac

SEQ ID NO: 1297 - DNA, 69 bp, synthetic construct
  misc_feature 1..69: note = Synthetic: 2898_ChineseTreeShrewMod_diMut_AG45TT_n1
  source 1..69: mol_type = other DNA
ggaggctgttggtgaatattaaccaaggtcacctcagttatcggttgagcaaacaagggctaagtccac

SEQ ID NO: 1298 - DNA, 69 bp, synthetic construct
  misc_feature 1..69: note = Synthetic: 2899_ChineseTreeShrewMod_diMut_GG46AA_n1
  source 1..69: mol_type = other DNA
ggaggctgttggtgaatattaaccaaggtcacctcagttatcggaaaagcaaacaagggctaagtccac

SEQ ID NO: 1299 - DNA, 69 bp, synthetic construct
  misc_feature 1..69: note = Synthetic: 2900_ChineseTreeShrewMod_diMut_GG46AC_n1
  source 1..69: mol_type = other DNA
ggaggctgttggtgaatattaaccaaggtcacctcagttatcggaacagcaaacaagggctaagtccac

SEQ ID NO: 1300 - DNA, 69 bp, synthetic construct
  misc_feature 1..69: note = Synthetic: 2901_ChineseTreeShrewMod_diMut_GG46AT_n1
  source 1..69: mol_type = other DNA
ggaggctgttggtgaatattaaccaaggtcacctcagttatcggaatagcaaacaagggctaagtccac

SEQ ID NO: 1301 - DNA, 69 bp, synthetic construct
  misc_feature 1..69: note = Synthetic: 2902_ChineseTreeShrewMod_diMut_GG46CA_n1
  source 1..69: mol_type = other DNA
ggaggctgttggtgaatattaaccaaggtcacctcagttatcggacaagcaaacaagggctaagtccac

SEQ ID NO: 1302 - DNA, 69 bp, synthetic construct
  misc_feature 1..69: note = Synthetic: 2903_ChineseTreeShrewMod_diMut_GG46CC_n1
  source 1..69: mol_type = other DNA
ggaggctgttggtgaatattaaccaaggtcacctcagttatcggaccagcaaacaagggctaagtccac

SEQ ID NO: 1303 - DNA, 69 bp, synthetic construct
  misc_feature 1..69: note = Synthetic: 2905_ChineseTreeShrewMod_diMut_GG46TA_n1
  source 1..69: mol_type = other DNA
ggaggctgttggtgaatattaaccaaggtcacctcagttatcggataagcaaacaagggctaagtccac

SEQ ID NO: 1304 - DNA, 69 bp, synthetic construct
  misc_feature 1..69: note = Synthetic: 2906_ChineseTreeShrewMod_diMut_GG46TC_n1
  source 1..69: mol_type = other DNA
ggaggctgttggtgaatattaaccaaggtcacctcagttatcggatcagcaaacaagggctaagtccac

SEQ ID NO: 1305 - DNA, 69 bp, synthetic construct
  misc_feature 1..69: note = Synthetic: 2908_ChineseTreeShrewMod_diMut_GA47AC_n1
  source 1..69: mol_type = other DNA
ggaggctgttggtgaatattaaccaaggtcacctcagttatcggagacgcaaacaagggctaagtccac

SEQ ID NO: 1306 - DNA, 69 bp, synthetic construct
  misc_feature 1..69: note = Synthetic: 2909_ChineseTreeShrewMod_diMut_GA47AG_n1
  source 1..69: mol_type = other DNA
ggaggctgttggtgaatattaaccaaggtcacctcagttatcggagaggcaaacaagggctaagtccac

SEQ ID NO: 1307 - DNA, 69 bp, synthetic construct
  misc_feature 1..69: note = Synthetic: 2911_ChineseTreeShrewMod_diMut_GA47CC_n1
  source 1..69: mol_type = other DNA
ggaggctgttggtgaatattaaccaaggtcacctcagttatcggagccgcaaacaagggctaagtccac

SEQ ID NO: 1308 - DNA, 69 bp, synthetic construct
  misc_feature 1..69: note = Synthetic: 2912_ChineseTreeShrewMod_diMut_GA47CG_n1
  source 1..69: mol_type = other DNA
ggaggctgttggtgaatattaaccaaggtcacctcagttatcggagcggcaaacaagggctaagtccac

SEQ ID NO: 1309 - DNA, 69 bp, synthetic construct
  misc_feature 1..69: note = Synthetic: 2915_ChineseTreeShrewMod_diMut_GA47TG_n1
  source 1..69: mol_type = other DNA
ggaggctgttggtgaatattaaccaaggtcacctcagttatcggagtggcaaacaagggctaagtccac

SEQ ID NO: 1310 - DNA, 69 bp, synthetic construct
  misc_feature 1..69: note = Synthetic: 2917_ChineseTreeShrewMod_diMut_AG48CA_n1
  source 1..69: mol_type = other DNA
ggaggctgttggtgaatattaaccaaggtcacctcagttatcggaggcacaaacaagggctaagtccac

SEQ ID NO: 1311 - DNA, 69 bp, synthetic construct
  misc_feature 1..69: note = Synthetic: 2919_ChineseTreeShrewMod_diMut_AG48CT_n1
  source 1..69: mol_type = other DNA
ggaggctgttggtgaatattaaccaaggtcacctcagttatcggaggctcaaacaagggctaagtccac

SEQ ID NO: 1312 - DNA, 69 bp, synthetic construct
  misc_feature 1..69: note = Synthetic: 2921_ChineseTreeShrewMod_diMut_AG48GC_n1
  source 1..69: mol_type = other DNA
ggaggctgttggtgaatattaaccaaggtcacctcagttatcggagggccaaacaagggctaagtccac

SEQ ID NO: 1313 - DNA, 69 bp, synthetic construct
  misc_feature 1..69: note = Synthetic: 2922_ChineseTreeShrewMod_diMut_AG48GT_n1
  source 1..69: mol_type = other DNA
ggaggctgttggtgaatattaaccaaggtcacctcagttatcggagggtcaaacaagggctaagtccac

SEQ ID NO: 1314 - DNA, 69 bp, synthetic construct
  misc_feature 1..69: note = Synthetic: 2923_ChineseTreeShrewMod_diMut_AG48TA_n1
  source 1..69: mol_type = other DNA
ggaggctgttggtgaatattaaccaaggtcacctcagttatcggaggtacaaacaagggctaagtccac

SEQ ID NO: 1315 - DNA, 69 bp, synthetic construct
  misc_feature 1..69: note = Synthetic: 2924_ChineseTreeShrewMod_diMut_AG48TC_n1
  source 1..69: mol_type = other DNA
ggaggctgttggtgaatattaaccaaggtcacctcagttatcggaggtccaaacaagggctaagtccac

SEQ ID NO: 1316 - DNA, 69 bp, synthetic construct
  misc_feature 1..69: note = Synthetic: 2928_ChineseTreeShrewMod_diMut_GC49AT_n1
  source 1..69: mol_type = other DNA
ggaggctgttggtgaatattaaccaaggtcacctcagttatcggaggaataaacaagggctaagtccac

SEQ ID NO: 1317 - DNA, 69 bp, synthetic construct
  misc_feature 1..69: note = Synthetic: 2931_ChineseTreeShrewMod_diMut_GC49CT_n1
  source 1..69: mol_type = other DNA
ggaggctgttggtgaatattaaccaaggtcacctcagttatcggaggactaaacaagggctaagtccac

SEQ ID NO: 1318 - DNA, 69 bp, synthetic construct
  misc_feature 1..69: note = Synthetic: 2934_ChineseTreeShrewMod_diMut_GC49TT_n1
  source 1..69: mol_type = other DNA
ggaggctgttggtgaatattaaccaaggtcacctcagttatcggaggattaaacaagggctaagtccac

SEQ ID NO: 1319 - DNA, 69 bp, synthetic construct
  misc_feature 1..69: note = Synthetic: 2940_ChineseTreeShrewMod_diMut_CA50GT_n1
  source 1..69: mol_type = other DNA
ggaggctgttggtgaatattaaccaaggtcacctcagttatcggaggaggtaacaagggctaagtccac

SEQ ID NO: 1320 - DNA, 69 bp, synthetic construct
  misc_feature 1..69: note = Synthetic: 2959_ChineseTreeShrewMod_diMut_AA52TC_n1
  source 1..69: mol_type = other DNA
ggaggctgttggtgaatattaaccaaggtcacctcagttatcggaggagcatccaagggctaagtccac

SEQ ID NO: 1321 - DNA, 69 bp, synthetic construct
  misc_feature 1..69: note = Synthetic: 2973_ChineseTreeShrewMod_diMut_CA54AT_n1
  source 1..69: mol_type = other DNA
ggaggctgttggtgaatattaaccaaggtcacctcagttatcggaggagcaaaatagggctaagtccac

SEQ ID NO: 1322 - DNA, 69 bp, synthetic construct
  misc_feature 1..69: note = Synthetic: 2977_ChineseTreeShrewMod_diMut_CA54TC_n1
  source 1..69: mol_type = other DNA
ggaggctgttggtgaatattaaccaaggtcacctcagttatcggaggagcaaatcagggctaagtccac

SEQ ID NO: 1323 - DNA, 69 bp, synthetic construct
  misc_feature 1..69: note = Synthetic: 2978_ChineseTreeShrewMod_diMut_CA54TG_n1
  source 1..69: mol_type = other DNA
ggaggctgttggtgaatattaaccaaggtcacctcagttatcggaggagcaaatgagggctaagtccac

SEQ ID NO: 1324 - DNA, 69 bp, synthetic construct
  misc_feature 1..69: note = Synthetic: 2995_ChineseTreeShrewMod_diMut_AG56TA_n1
  source 1..69: mol_type = other DNA
ggaggctgttggtgaatattaaccaaggtcacctcagttatcggaggagcaaacataggctaagtccac

SEQ ID NO: 1325 - DNA, 69 bp, synthetic construct
  misc_feature 1..69: note = Synthetic: 3013_ChineseTreeShrewMod_diMut_GG58TA_n1
  source 1..69: mol_type = other DNA
ggaggctgttggtgaatattaaccaaggtcacctcagttatcggaggagcaaacaagtactaagtccac

SEQ ID NO: 1326 - DNA, 69 bp, synthetic construct
  misc_feature 1..69: note = Synthetic: 3014_ChineseTreeShrewMod_diMut_GG58TC_n1
  source 1..69: mol_type = other DNA
ggaggctgttggtgaatattaaccaaggtcacctcagttatcggaggagcaaacaagtcctaagtccac

SEQ ID NO: 1327 - DNA, 69 bp, synthetic construct
  misc_feature 1..69: note = Synthetic: 3015_ChineseTreeShrewMod_diMut_GG58TT_n1
  source 1..69: mol_type = other DNA
ggaggctgttggtgaatattaaccaaggtcacctcagttatcggaggagcaaacaagttctaagtccac

SEQ ID NO: 1328 - DNA, 69 bp, synthetic construct
  misc_feature 1..69: note = Synthetic: 3025_ChineseTreeShrewMod_diMut_CT60AA_n1
  source 1..69: mol_type = other DNA
ggaggctgttggtgaatattaaccaaggtcacctcagttatcggaggagcaaacaagggaaaagtccac

SEQ ID NO: 1329 - DNA, 69 bp, synthetic construct
  misc_feature 1..69: note = Synthetic: 3028_ChineseTreeShrewMod_diMut_CT60GA_n1
  source 1..69: mol_type = other DNA
ggaggctgttggtgaatattaaccaaggtcacctcagttatcggaggagcaaacaaggggaaagtccac

SEQ ID NO: 1330 - DNA, 69 bp, synthetic construct
  misc_feature 1..69: note = Synthetic: 3031_ChineseTreeShrewMod_diMut_CT60TA_n1
  source 1..69: mol_type = other DNA
ggaggctgttggtgaatattaaccaaggtcacctcagttatcggaggagcaaacaagggtaaagtccac

SEQ ID NO: 1331 - DNA, 69 bp, synthetic construct
  misc_feature 1..69: note = Synthetic: 3036_ChineseTreeShrewMod_diMut_TA61AT_n1
  source 1..69: mol_type = other DNA
ggaggctgttggtgaatattaaccaaggtcacctcagttatcggaggagcaaacaagggcatagtccac

SEQ ID NO: 1332 - DNA, 69 bp, synthetic construct
  misc_feature 1..69: note = Synthetic: 3073_ChineseTreeShrewMod_diMut_TC65CA_n1
  source 1..69: mol_type = other DNA
ggaggctgttggtgaatattaaccaaggtcacctcagttatcggaggagcaaacaagggctaagcacac

SEQ ID NO: 1333 - DNA, 69 bp, synthetic construct
  misc_feature 1..69: note = Synthetic: 3078_ChineseTreeShrewMod_diMut_TC65GT_n1
  source 1..69: mol_type = other DNA
ggaggctgttggtgaatattaaccaaggtcacctcagttatcggaggagcaaacaagggctaaggtcac

SEQ ID NO: 1334 - DNA, 69 bp, synthetic construct
  misc_feature 1..69: note = Synthetic: 3079_ChineseTreeShrewMod_diMut_CC66AA_n1
  source 1..69: mol_type = other DNA
ggaggctgttggtgaatattaaccaaggtcacctcagttatcggaggagcaaacaagggctaagtaaac

SEQ ID NO: 1335 - DNA, 69 bp, synthetic construct
  misc_feature 1..69: note = Synthetic: 3090_ChineseTreeShrewMod_diMut_CA67AT_n1
  source 1..69: mol_type = other DNA
ggaggctgttggtgaatattaaccaaggtcacctcagttatcggaggagcaaacaagggctaagtcatc

SEQ ID NO: 1336 - DNA, 70 bp, synthetic construct
  misc_feature 1..70: note = Synthetic: 1256_Bushbaby_monoMut_G1A_n1
  source 1..70: mol_type = other DNA
aggggaagctactggtgaatattaaccaaggtcacccagttatcagggagcaaacaggagctaagtccat

SEQ ID NO: 1337 - DNA, 70 bp, synthetic construct
  misc_feature 1..70: note = Synthetic: 1262_Bushbaby_monoMut_G3A_n1
  source 1..70: mol_type = other DNA
ggaggaagctactggtgaatattaaccaaggtcacccagttatcagggagcaaacaggagctaagtccat

SEQ ID NO: 1338 - DNA, 70 bp, synthetic construct
  misc_feature 1..70: note = Synthetic: 1263_Bushbaby_monoMut_G3C_n1
  source 1..70: mol_type = other DNA
ggcggaagctactggtgaatattaaccaaggtcacccagttatcagggagcaaacaggagctaagtccat

SEQ ID NO: 1339 - DNA, 70 bp, synthetic construct
  misc_feature 1..70: note = Synthetic: 1270_Bushbaby_monoMut_G5T_n1
  source 1..70: mol_type = other DNA
ggggtaagctactggtgaatattaaccaaggtcacccagttatcagggagcaaacaggagctaagtccat

SEQ ID NO: 1340 - DNA, 70 bp, synthetic construct
  misc_feature 1..70: note = Synthetic: 1273_Bushbaby_monoMut_A6T_n1
  source 1..70: mol_type = other DNA
gggggtagctactggtgaatattaaccaaggtcacccagttatcagggagcaaacaggagctaagtccat

SEQ ID NO: 1341 - DNA, 70 bp, synthetic construct
  misc_feature 1..70: note = Synthetic: 1277_Bushbaby_monoMut_G8A_n1
  source 1..70: mol_type = other DNA
gggggaaactactggtgaatattaaccaaggtcacccagttatcagggagcaaacaggagctaagtccat

SEQ ID NO: 1342 - DNA, 70 bp, synthetic construct
  misc_feature 1..70: note = Synthetic: 1282_Bushbaby_monoMut_C9T_n1
  source 1..70: mol_type = other DNA
gggggaagttactggtgaatattaaccaaggtcacccagttatcagggagcaaacaggagctaagtccat

SEQ ID NO: 1343 - DNA, 70 bp, synthetic construct
  misc_feature 1..70: note = Synthetic: 1284_Bushbaby_monoMut_T10C_n1
  source 1..70: mol_type = other DNA
gggggaagccactggtgaatattaaccaaggtcacccagttatcagggagcaaacaggagctaagtccat

SEQ ID NO: 1344 - DNA, 70 bp, synthetic construct
  misc_feature 1..70: note = Synthetic: 1286_Bushbaby_monoMut_A11C_n1
  source 1..70: mol_type = other DNA
gggggaagctcctggtgaatattaaccaaggtcacccagttatcagggagcaaacaggagctaagtccat

SEQ ID NO: 1345 - DNA, 70 bp, synthetic construct
  misc_feature 1..70: note = Synthetic: 1287_Bushbaby_monoMut_A11G_n1
  source 1..70: mol_type = other DNA
gggggaagctgctggtgaatattaaccaaggtcacccagttatcagggagcaaacaggagctaagtccat

SEQ ID NO: 1346 - DNA, 70 bp, synthetic construct
  misc_feature 1..70: note = Synthetic: 1288_Bushbaby_monoMut_A11T_n1
  source 1..70: mol_type = other DNA
gggggaagcttctggtgaatattaaccaaggtcacccagttatcagggagcaaacaggagctaagtccat

SEQ ID NO: 1347 - DNA, 70 bp, synthetic construct
  misc_feature 1..70: note = Synthetic: 1294_Bushbaby_monoMut_T13G_n1
  source 1..70: mol_type = other DNA
gggggaagctacgggtgaatattaaccaaggtcacccagttatcagggagcaaacaggagctaagtccat

SEQ ID NO: 1348 - DNA, 70 bp, synthetic construct
  misc_feature 1..70: note = Synthetic: 1300_Bushbaby_monoMut_G15T_n1
  source 1..70: mol_type = other DNA
gggggaagctactgttgaatattaaccaaggtcacccagttatcagggagcaaacaggagctaagtccat

SEQ ID NO: 1349 - DNA, 70 bp, synthetic construct
  misc_feature 1..70: note = Synthetic: 1306_Bushbaby_monoMut_G17T_n1
  source 1..70: mol_type = other DNA
gggggaagctactggttaatattaaccaaggtcacccagttatcagggagcaaacaggagctaagtccat

SEQ ID NO: 1350 - DNA, 70 bp, synthetic construct
  misc_feature 1..70: note = Synthetic: 1310_Bushbaby_monoMut_A19C_n1
  source 1..70: mol_type = other DNA
gggggaagctactggtgactattaaccaaggtcacccagttatcagggagcaaacaggagctaagtccat

SEQ ID NO: 1351 - DNA, 70 bp, synthetic construct
  misc_feature 1..70: note = Synthetic: 1311_Bushbaby_monoMut_A19G_n1
  source 1..70: mol_type = other DNA
gggggaagctactggtgagtattaaccaaggtcacccagttatcagggagcaaacaggagctaagtccat

SEQ ID NO: 1352 - DNA, 70 bp, synthetic construct
  misc_feature 1..70: note = Synthetic: 1324_Bushbaby_monoMut_T23G_n1
  source 1..70: mol_type = other DNA
gggggaagctactggtgaatatgaaccaaggtcacccagttatcagggagcaaacaggagctaagtccat

SEQ ID NO: 1353 - DNA, 70 bp, synthetic construct
  misc_feature 1..70: note = Synthetic: 1330_Bushbaby_monoMut_A25T_n1
  source 1..70: mol_type = other DNA
gggggaagctactggtgaatattatccaaggtcacccagttatcagggagcaaacaggagctaagtccat

SEQ ID NO: 1354 - DNA, 70 bp, synthetic construct
  misc_feature 1..70: note = Synthetic: 1352_Bushbaby_monoMut_C33A_n1
  source 1..70: mol_type = other DNA
gggggaagctactggtgaatattaaccaaggtaacccagttatcagggagcaaacaggagctaagtccat

SEQ ID NO: 1355 - DNA, 70 bp, synthetic construct
  misc_feature 1..70: note = Synthetic: 1359_Bushbaby_monoMut_C35G_n1
  source 1..70: mol_type = other DNA
gggggaagctactggtgaatattaaccaaggtcagccagttatcagggagcaaacaggagctaagtccat

SEQ ID NO: 1356 - DNA, 70 bp, synthetic construct
  misc_feature 1..70: note = Synthetic: 1360_Bushbaby_monoMut_C35T_n1
  source 1..70: mol_type = other DNA
gggggaagctactggtgaatattaaccaaggtcatccagttatcagggagcaaacaggagctaagtccat

SEQ ID NO: 1357 - DNA, 70 bp, synthetic construct
  misc_feature 1..70: note = Synthetic: 1361_Bushbaby_monoMut_C36A_n1
  source 1..70: mol_type = other DNA
gggggaagctactggtgaatattaaccaaggtcacacagttatcagggagcaaacaggagctaagtccat

SEQ ID NO: 1358 - DNA, 70 bp, synthetic construct
  misc_feature 1..70: note = Synthetic: 1362_Bushbaby_monoMut_C36G_n1
  source 1..70: mol_type = other DNA
gggggaagctactggtgaatattaaccaaggtcacgcagttatcagggagcaaacaggagctaagtccat

SEQ ID NO: 1359 - DNA, 70 bp, synthetic construct
  misc_feature 1..70: note = Synthetic: 1363_Bushbaby_monoMut_C36T_n1
  source 1..70: mol_type = other DNA
gggggaagctactggtgaatattaaccaaggtcactcagttatcagggagcaaacaggagctaagtccat

SEQ ID NO: 1360 - DNA, 70 bp, synthetic construct
  misc_feature 1..70: note = Synthetic: 1365_Bushbaby_monoMut_C37G_n1
  source 1..70: mol_type = other DNA
gggggaagctactggtgaatattaaccaaggtcaccgagttatcagggagcaaacaggagctaagtccat

SEQ ID NO: 1361 - DNA, 70 bp, synthetic construct
  misc_feature 1..70: note = Synthetic: 1367_Bushbaby_monoMut_A38C_n1
  source 1..70: mol_type = other DNA
gggggaagctactggtgaatattaaccaaggtcaccccgttatcagggagcaaacaggagctaagtccat

SEQ ID NO: 1362 - DNA, 70 bp, synthetic construct
  misc_feature 1..70: note = Synthetic: 1368_Bushbaby_monoMut_A38G_n1
  source 1..70: mol_type = other DNA
gggggaagctactggtgaatattaaccaaggtcacccggttatcagggagcaaacaggagctaagtccat

SEQ ID NO: 1363 - DNA, 70 bp, synthetic construct
  misc_feature 1..70: note = Synthetic: 1372_Bushbaby_monoMut_G39T_n1
  source 1..70: mol_type = other DNA
gggggaagctactggtgaatattaaccaaggtcacccatttatcagggagcaaacaggagctaagtccat

SEQ ID NO: 1364 - DNA, 70 bp, synthetic construct
  misc_feature 1..70: note = Synthetic: 1375_Bushbaby_monoMut_T40G_n1
  source 1..70: mol_type = other DNA
gggggaagctactggtgaatattaaccaaggtcacccaggtatcagggagcaaacaggagctaagtccat

SEQ ID NO: 1365 - DNA, 70 bp, synthetic construct
  misc_feature 1..70: note = Synthetic: 1380_Bushbaby_monoMut_A42G_n1
  source 1..70: mol_type = other DNA
gggggaagctactggtgaatattaaccaaggtcacccagttgtcagggagcaaacaggagctaagtccat

SEQ ID NO: 1366 - DNA, 70 bp, synthetic construct
  misc_feature 1..70: note = Synthetic: 1383_Bushbaby_monoMut_T43C_n1
  source 1..70: mol_type = other DNA
gggggaagctactggtgaatattaaccaaggtcacccagttaccagggagcaaacaggagctaagtccat

SEQ ID NO: 1367 - DNA, 70 bp, synthetic construct
  misc_feature 1..70: note = Synthetic: 1384_Bushbaby_monoMut_T43G_n1
  source 1..70: mol_type = other DNA
gggggaagctactggtgaatattaaccaaggtcacccagttagcagggagcaaacaggagctaagtccat

SEQ ID NO: 1368 - DNA, 70 bp, synthetic construct
  misc_feature 1..70: note = Synthetic: 1390_Bushbaby_monoMut_A45T_n1
  source 1..70: mol_type = other DNA
gggggaagctactggtgaatattaaccaaggtcacccagttatctgggagcaaacaggagctaagtccat

SEQ ID NO: 1369 - DNA, 70 bp, synthetic construct
  misc_feature 1..70: note = Synthetic: 1393_Bushbaby_monoMut_G46T_n1
  source 1..70: mol_type = other DNA
gggggaagctactggtgaatattaaccaaggtcacccagttatcatggagcaaacaggagctaagtccat

SEQ ID NO: 1370 - DNA, 70 bp, synthetic construct
  misc_feature 1..70: note = Synthetic: 1394_Bushbaby_monoMut_G47A_n1
  source 1..70: mol_type = other DNA
gggggaagctactggtgaatattaaccaaggtcacccagttatcagagagcaaacaggagctaagtccat

SEQ ID NO: 1371 - DNA, 70 bp, synthetic construct
  misc_feature 1..70: note = Synthetic: 1396_Bushbaby_monoMut_G47T_n1
  source 1..70: mol_type = other DNA
gggggaagctactggtgaatattaaccaaggtcacccagttatcagtgagcaaacaggagctaagtccat

SEQ ID NO: 1372 - DNA, 70 bp, synthetic construct
  misc_feature 1..70: note = Synthetic: 1397_Bushbaby_monoMut_G48A_n1
  source 1..70: mol_type = other DNA
gggggaagctactggtgaatattaaccaaggtcacccagttatcaggaagcaaacaggagctaagtccat

SEQ ID NO: 1373 - DNA, 70 bp, synthetic construct
  misc_feature 1..70: note = Synthetic: 1402_Bushbaby_monoMut_A49T_n1
  source 1..70: mol_type = other DNA
gggggaagctactggtgaatattaaccaaggtcacccagttatcagggtgcaaacaggagctaagtccat

SEQ ID NO: 1374 - DNA, 70 bp, synthetic construct
  misc_feature 1..70: note = Synthetic: 1405_Bushbaby_monoMut_G50T_n1
  source 1..70: mol_type = other DNA
gggggaagctactggtgaatattaaccaaggtcacccagttatcagggatcaaacaggagctaagtccat

SEQ ID NO: 1375 - DNA, 70 bp, synthetic construct
  misc_feature 1..70: note = Synthetic: 1411_Bushbaby_monoMut_A52T_n1
  source 1..70: mol_type = other DNA
gggggaagctactggtgaatattaaccaaggtcacccagttatcagggagctaacaggagctaagtccat

SEQ ID NO: 1376 - DNA, 70 bp, synthetic construct
  misc_feature 1..70: note = Synthetic: 1413_Bushbaby_monoMut_A53G_n1
  source 1..70: mol_type = other DNA
gggggaagctactggtgaatattaaccaaggtcacccagttatcagggagcagacaggagctaagtccat

SEQ ID NO: 1377 - DNA, 70 bp, synthetic construct
  misc_feature 1..70: note = Synthetic: 1424_Bushbaby_monoMut_G57A_n1
  source 1..70: mol_type = other DNA
gggggaagctactggtgaatattaaccaaggtcacccagttatcagggagcaaacaagagctaagtccat

SEQ ID NO: 1378 - DNA, 70 bp, synthetic construct
  misc_feature 1..70: note = Synthetic: 1431_Bushbaby_monoMut_A59G_n1
  source 1..70: mol_type = other DNA
gggggaagctactggtgaatattaaccaaggtcacccagttatcagggagcaaacaggggctaagtccat

SEQ ID NO: 1379 - DNA, 70 bp, synthetic construct
  misc_feature 1..70: note = Synthetic: 1432_Bushbaby_monoMut_A59T_n1
  source 1..70: mol_type = other DNA
gggggaagctactggtgaatattaaccaaggtcacccagttatcagggagcaaacaggtgctaagtccat

SEQ ID NO: 1380 - DNA, 70 bp, synthetic construct
  misc_feature 1..70: note = Synthetic: 1433_Bushbaby_monoMut_G60A_n1
  source 1..70: mol_type = other DNA
gggggaagctactggtgaatattaaccaaggtcacccagttatcagggagcaaacaggaactaagtccat

SEQ ID NO: 1381 - DNA, 70 bp, synthetic construct
  misc_feature 1..70: note = Synthetic: 1439_Bushbaby_monoMut_T62A_n1
  source 1..70: mol_type = other DNA
gggggaagctactggtgaatattaaccaaggtcacccagttatcagggagcaaacaggagcaaagtccat

SEQ ID NO: 1382 - DNA, 70 bp, synthetic construct
  misc_feature 1..70: note = Synthetic: 1441_Bushbaby_monoMut_T62G_n1
  source 1..70: mol_type = other DNA
gggggaagctactggtgaatattaaccaaggtcacccagttatcagggagcaaacaggagcgaagtccat

SEQ ID NO: 1383 - DNA, 70 bp, synthetic construct
  misc_feature 1..70: note = Synthetic: 1443_Bushbaby_monoMut_A63G_n1
  source 1..70: mol_type = other DNA
gggggaagctactggtgaatattaaccaaggtcacccagttatcagggagcaaacaggagctgagtccat

SEQ ID NO: 1384 - DNA, 70 bp, synthetic construct
  misc_feature 1..70: note = Synthetic: 1457_Bushbaby_monoMut_C68A_n1
  source 1..70: mol_type = other DNA
gggggaagctactggtgaatattaaccaaggtcacccagttatcagggagcaaacaggagctaagtcaat

SEQ ID NO: 1385 - DNA, 70 bp, synthetic construct
  misc_feature 1..70: note = Synthetic: 1463_Bushbaby_monoMut_T70A_n1
  source 1..70: mol_type = other DNA
gggggaagctactggtgaatattaaccaaggtcacccagttatcagggagcaaacaggagctaagtccaa

SEQ ID NO: 1386 - DNA, 70 bp, synthetic construct
  misc_feature 1..70: note = Synthetic: 1464_Bushbaby_monoMut_T70C_n1
  source 1..70: mol_type = other DNA
gggggaagctactggtgaatattaaccaaggtcacccagttatcagggagcaaacaggagctaagtccac

SEQ ID NO: 1387 - DNA, 70 bp, synthetic construct
  misc_feature 1..70: note = Synthetic: 1467_Bushbaby_diMut_GG1AC_n1
  source 1..70: mol_type = other DNA
acgggaagctactggtgaatattaaccaaggtcacccagttatcagggagcaaacaggagctaagtccat

SEQ ID NO: 1388 - DNA, 70 bp, synthetic construct
  misc_feature 1..70: note = Synthetic: 1470_Bushbaby_diMut_GG1CC_n1
  source 1..70: mol_type = other DNA
ccgggaagctactggtgaatattaaccaaggtcacccagttatcagggagcaaacaggagctaagtccat

SEQ ID NO: 1389 - DNA, 70 bp, synthetic construct
  misc_feature 1..70: note = Synthetic: 1476_Bushbaby_diMut_GG2AC_n1
  source 1..70: mol_type = other DNA
gacggaagctactggtgaatattaaccaaggtcacccagttatcagggagcaaacaggagctaagtccat

SEQ ID NO: 1390 - DNA, 70 bp, synthetic construct
  misc_feature 1..70: note = Synthetic: 1478_Bushbaby_diMut_GG2CA_n1
  source 1..70: mol_type = other DNA
gcaggaagctactggtgaatattaaccaaggtcacccagttatcagggagcaaacaggagctaagtccat

SEQ ID NO: 1391 - DNA, 70 bp, synthetic construct
  misc_feature 1..70: note = Synthetic: 1479_Bushbaby_diMut_GG2CC_n1
  source 1..70: mol_type = other DNA
gccggaagctactggtgaatattaaccaaggtcacccagttatcagggagcaaacaggagctaagtccat

SEQ ID NO: 1392 - DNA, 70 bp, synthetic construct
  misc_feature 1..70: note = Synthetic: 1482_Bushbaby_diMut_GG2TC_n1
  source 1..70: mol_type = other DNA
gtcggaagctactggtgaatattaaccaaggtcacccagttatcagggagcaaacaggagctaagtccat

SEQ ID NO: 1393 - DNA, 70 bp, synthetic construct
  misc_feature 1..70: note = Synthetic: 1484_Bushbaby_diMut_GG3AA_n1
  source 1..70: mol_type = other DNA
ggaagaagctactggtgaatattaaccaaggtcacccagttatcagggagcaaacaggagctaagtccat

SEQ ID NO: 1394 - DNA, 70 bp, synthetic construct
  misc_feature 1..70: note = Synthetic: 1495_Bushbaby_diMut_GG4AT_n1
  source 1..70: mol_type = other DNA
gggataagctactggtgaatattaaccaaggtcacccagttatcagggagcaaacaggagctaagtccat

SEQ ID NO: 1395 - DNA, 70 bp, synthetic construct
  misc_feature 1..70: note = Synthetic: 1497_Bushbaby_diMut_GG4CC_n1
  source 1..70: mol_type = other DNA
gggccaagctactggtgaatattaaccaaggtcacccagttatcagggagcaaacaggagctaagtccat

SEQ ID NO: 1396 - DNA, 70 bp, synthetic construct
  misc_feature 1..70: note = Synthetic: 1506_Bushbaby_diMut_GA5CG_n1
  source 1..70: mol_type = other DNA
ggggcgagctactggtgaatattaaccaaggtcacccagttatcagggagcaaacaggagctaagtccat

SEQ ID NO: 1397 - DNA, 70 bp, synthetic construct
  misc_feature 1..70: note = Synthetic: 1507_Bushbaby_diMut_GA5CT_n1
  source 1..70: mol_type = other DNA
ggggctagctactggtgaatattaaccaaggtcacccagttatcagggagcaaacaggagctaagtccat

SEQ ID NO: 1398 - DNA, 70 bp, synthetic construct
  misc_feature 1..70: note = Synthetic: 1515_Bushbaby_diMut_AA6GG_n1
  source 1..70: mol_type = other DNA
ggggggggctactggtgaatattaaccaaggtcacccagttatcagggagcaaacaggagctaagtccat

SEQ ID NO: 1399 - DNA, 70 bp, synthetic construct
  misc_feature 1..70: note = Synthetic: 1516_Bushbaby_diMut_AA6GT_n1
  source 1..70: mol_type = other DNA
ggggggtgctactggtgaatattaaccaaggtcacccagttatcagggagcaaacaggagctaagtccat

SEQ ID NO: 1400 - DNA, 70 bp, synthetic construct
  misc_feature 1..70: note = Synthetic: 1519_Bushbaby_diMut_AA6TT_n1
  source 1..70: mol_type = other DNA
gggggttgctactggtgaatattaaccaaggtcacccagttatcagggagcaaacaggagctaagtccat

SEQ ID NO: 1401 - DNA, 70 bp, synthetic construct
  misc_feature 1..70: note = Synthetic: 1521_Bushbaby_diMut_AG7CC_n1
  source 1..70: mol_type = other DNA
gggggaccctactggtgaatattaaccaaggtcacccagttatcagggagcaaacaggagctaagtccat

SEQ ID NO: 1402 - DNA, 70 bp, synthetic construct
  misc_feature 1..70: note = Synthetic: 1523_Bushbaby_diMut_AG7GA_n1
  source 1..70: mol_type = other DNA
gggggagactactggtgaatattaaccaaggtcacccagttatcagggagcaaacaggagctaagtccat

SEQ ID NO: 1403 - DNA, 70 bp, synthetic construct
  misc_feature 1..70: note = Synthetic: 1525_Bushbaby_diMut_AG7GT_n1
  source 1..70: mol_type = other DNA
gggggagtctactggtgaatattaaccaaggtcacccagttatcagggagcaaacaggagctaagtccat

SEQ ID NO: 1404 - DNA, 70 bp, synthetic construct
  misc_feature 1..70: note = Synthetic: 1529_Bushbaby_diMut_GC8AA_n1
  source 1..70: mol_type = other DNA
gggggaaaatactggtgaatattaaccaaggtcacccagttatcagggagcaaacaggagctaagtccat

SEQ ID NO: 1405 - DNA, 70 bp, synthetic construct
  misc_feature 1..70: note = Synthetic: 1531_Bushbaby_diMut_GC8AT_n1
  source 1..70: mol_type = other DNA
gggggaaattactggtgaatattaaccaaggtcacccagttatcagggagcaaacaggagctaagtccat

SEQ ID NO: 1406 - DNA, 70 bp, synthetic construct
  misc_feature 1..70: note = Synthetic: 1533_Bushbaby_diMut_GC8CG_n1
  source 1..70: mol_type = other DNA
gggggaacgtactggtgaatattaaccaaggtcacccagttatcagggagcaaacaggagctaagtccat

SEQ ID NO: 1407 - DNA, 70 bp, synthetic construct
  misc_feature 1..70: note = Synthetic: 1535_Bushbaby_diMut_GC8TA_n1
  source 1..70: mol_type = other DNA
gggggaatatactggtgaatattaaccaaggtcacccagttatcagggagcaaacaggagctaagtccat

SEQ ID NO: 1408 - DNA, 70 bp, synthetic construct
  misc_feature 1..70: note = Synthetic: 1536_Bushbaby_diMut_GC8TG_n1
  source 1..70: mol_type = other DNA
gggggaatgtactggtgaatattaaccaaggtcacccagttatcagggagcaaacaggagctaagtccat

SEQ ID NO: 1409 - DNA, 70 bp, synthetic construct
  misc_feature 1..70: note = Synthetic: 1537_Bushbaby_diMut_GC8TT_n1
  source 1..70: mol_type = other DNA
gggggaatttactggtgaatattaaccaaggtcacccagttatcagggagcaaacaggagctaagtccat

SEQ ID NO: 1410 - DNA, 70 bp, synthetic construct
  misc_feature 1..70: note = Synthetic: 1539_Bushbaby_diMut_CT9AC_n1
  source 1..70: mol_type = other DNA
gggggaagacactggtgaatattaaccaaggtcacccagttatcagggagcaaacaggagctaagtccat

SEQ ID NO: 1411 - DNA, 70 bp, synthetic construct
  misc_feature 1..70: note = Synthetic: 1540_Bushbaby_diMut_CT9AG_n1
  source 1..70: mol_type = other DNA
gggggaagagactggtgaatattaaccaaggtcacccagttatcagggagcaaacaggagctaagtccat

SEQ ID NO: 1412 - DNA, 70 bp, synthetic construct
  misc_feature 1..70: note = Synthetic: 1541_Bushbaby_diMut_CT9GA_n1
  source 1..70: mol_type = other DNA
gggggaaggaactggtgaatattaaccaaggtcacccagttatcagggagcaaacaggagctaagtccat

SEQ ID NO: 1413 - DNA, 70 bp, synthetic construct
  misc_feature 1..70: note = Synthetic: 1542_Bushbaby_diMut_CT9GC_n1
  source 1..70: mol_type = other DNA
gggggaaggcactggtgaatattaaccaaggtcacccagttatcagggagcaaacaggagctaagtccat

SEQ ID NO: 1414 - DNA, 70 bp, synthetic construct
  misc_feature 1..70: note = Synthetic: 1543_Bushbaby_diMut_CT9GG_n1
  source 1..70: mol_type = other DNA
gggggaagggactggtgaatattaaccaaggtcacccagttatcagggagcaaacaggagctaagtccat

SEQ ID NO: 1415 - DNA, 70 bp, synthetic construct
  misc_feature 1..70: note = Synthetic: 1544_Bushbaby_diMut_CT9TA_n1
  source 1..70: mol_type = other DNA
gggggaagtaactggtgaatattaaccaaggtcacccagttatcagggagcaaacaggagctaagtccat

SEQ ID NO: 1416 - DNA, 70 bp, synthetic construct
  misc_feature 1..70: note = Synthetic: 1545_Bushbaby_diMut_CT9TC_n1
  source 1..70: mol_type = other DNA
gggggaagtcactggtgaatattaaccaaggtcacccagttatcagggagcaaacaggagctaagtccat

SEQ ID NO: 1417 - DNA, 70 bp, synthetic construct
  misc_feature 1..70: note = Synthetic: 1546_Bushbaby_diMut_CT9TG_n1
  source 1..70: mol_type = other DNA
gggggaagtgactggtgaatattaaccaaggtcacccagttatcagggagcaaacaggagctaagtccat

SEQ ID NO: 1418 - DNA, 70 bp, synthetic construct
  misc_feature 1..70: note = Synthetic: 1550_Bushbaby_diMut_TA10CC_n1
  source 1..70: mol_type = other DNA
gggggaagcccctggtgaatattaaccaaggtcacccagttatcagggagcaaacaggagctaagtccat

SEQ ID NO: 1419 - DNA, 70 bp, synthetic construct
  misc_feature 1..70: note = Synthetic: 1551_Bushbaby_diMut_TA10CG_n1
  source 1..70: mol_type = other DNA
gggggaagccgctggtgaatattaaccaaggtcacccagttatcagggagcaaacaggagctaagtccat

SEQ ID NO: 1420 - DNA, 70 bp, synthetic construct
  misc_feature 1..70: note = Synthetic: 1553_Bushbaby_diMut_TA10GC_n1
  source 1..70: mol_type = other DNA
gggggaagcgcctggtgaatattaaccaaggtcacccagttatcagggagcaaacaggagctaagtccat

SEQ ID NO: 1421 - DNA, 70 bp, synthetic construct
  misc_feature 1..70: note = Synthetic: 1555_Bushbaby_diMut_TA10GT_n1
  source 1..70: mol_type = other DNA
gggggaagcgtctggtgaatattaaccaaggtcacccagttatcagggagcaaacaggagctaagtccat

SEQ ID NO: 1422 - DNA, 70 bp, synthetic construct
  misc_feature 1..70: note = Synthetic: 1563_Bushbaby_diMut_AC11TG_n1
  source 1..70: mol_type = other DNA
gggggaagcttgtggtgaatattaaccaaggtcacccagttatcagggagcaaacaggagctaagtccat

SEQ ID NO: 1423 - DNA, 70 bp, synthetic construct
  misc_feature 1..70: note = Synthetic: 1564_Bushbaby_diMut_AC11TT_n1
  source 1..70: mol_type = other DNA
gggggaagcttttggtgaatattaaccaaggtcacccagttatcagggagcaaacaggagctaagtccat

SEQ ID NO: 1424 - DNA, 70 bp, synthetic construct
  misc_feature 1..70: note = Synthetic: 1567_Bushbaby_diMut_CT12AG_n1
  source 1..70: mol_type = other DNA
gggggaagctaagggtgaatattaaccaaggtcacccagttatcagggagcaaacaggagctaagtccat

SEQ ID NO: 1425 - DNA, 70 bp, synthetic construct
  misc_feature 1..70: note = Synthetic: 1573_Bushbaby_diMut_CT12TG_n1
  source 1..70: mol_type = other DNA
gggggaagctatgggtgaatattaaccaaggtcacccagttatcagggagcaaacaggagctaagtccat

SEQ ID NO: 1426 - DNA, 70 bp, synthetic construct
  misc_feature 1..70: note = Synthetic: 1574_Bushbaby_diMut_TG13AA_n1
  source 1..70: mol_type = other DNA
gggggaagctacaagtgaatattaaccaaggtcacccagttatcagggagcaaacaggagctaagtccat

SEQ ID NO: 1427 - DNA, 70 bp, synthetic construct
  misc_feature 1..70: note = Synthetic: 1585_Bushbaby_diMut_GG14AT_n1
  source 1..70: mol_type = other DNA
gggggaagctactattgaatattaaccaaggtcacccagttatcagggagcaaacaggagctaagtccat

SEQ ID NO: 1428 - DNA, 70 bp, synthetic construct
  misc_feature 1..70: note = Synthetic: 1593_Bushbaby_diMut_GT15AC_n1
  source 1..70: mol_type = other DNA
gggggaagctactgacgaatattaaccaaggtcacccagttatcagggagcaaacaggagctaagtccat

SEQ ID NO: 1429 - DNA, 70 bp, synthetic construct
  misc_feature 1..70: note = Synthetic: 1598_Bushbaby_diMut_GT15TA_n1
  source 1..70: mol_type = other DNA
gggggaagctactgtagaatattaaccaaggtcacccagttatcagggagcaaacaggagctaagtccat

SEQ ID NO: 1430 - DNA, 70 bp, synthetic construct
  misc_feature 1..70: note = Synthetic: 1600_Bushbaby_diMut_GT15TG_n1
  source 1..70: mol_type = other DNA
gggggaagctactgtggaatattaaccaaggtcacccagttatcagggagcaaacaggagctaagtccat

SEQ ID NO: 1431 - DNA, 70 bp, synthetic construct
  misc_feature 1..70: note = Synthetic: 1601_Bushbaby_diMut_TG16AA_n1
  source 1..70: mol_type = other DNA
gggggaagctactggaaaatattaaccaaggtcacccagttatcagggagcaaacaggagctaagtccat

SEQ ID NO: 1432 - DNA, 70 bp, synthetic construct
  misc_feature 1..70: note = Synthetic: 1617_Bushbaby_diMut_GA17TG_n1
  source 1..70: mol_type = other DNA
gggggaagctactggttgatattaaccaaggtcacccagttatcagggagcaaacaggagctaagtccat

SEQ ID NO: 1433 - DNA, 70 bp, synthetic construct
  misc_feature 1..70: note = Synthetic: 1622_Bushbaby_diMut_AA18GC_n1
  source 1..70: mol_type = other DNA
gggggaagctactggtggctattaaccaaggtcacccagttatcagggagcaaacaggagctaagtccat

SEQ ID NO: 1434 - DNA, 70 bp, synthetic construct
  misc_feature 1..70: note = Synthetic: 1629_Bushbaby_diMut_AT19CC_n1
  source 1..70: mol_type = other DNA
gggggaagctactggtgaccattaaccaaggtcacccagttatcagggagcaaacaggagctaagtccat

SEQ ID NO: 1435 - DNA, 70 bp, synthetic construct
  misc_feature 1..70: note = Synthetic: 1642_Bushbaby_diMut_TA20CT_n1
  source 1..70: mol_type = other DNA
gggggaagctactggtgaactttaaccaaggtcacccagttatcagggagcaaacaggagctaagtccat

SEQ ID NO: 1436 - DNA, 70 bp, synthetic construct
  misc_feature 1..70: note = Synthetic: 1645_Bushbaby_diMut_TA20GT_n1
  source 1..70: mol_type = other DNA
gggggaagctactggtgaagtttaaccaaggtcacccagttatcagggagcaaacaggagctaagtccat

SEQ ID NO: 1437 - DNA, 70 bp, synthetic construct
  misc_feature 1..70: note = Synthetic: 1647_Bushbaby_diMut_AT21CC_n1
  source 1..70: mol_type = other DNA
gggggaagctactggtgaatcctaaccaaggtcacccagttatcagggagcaaacaggagctaagtccat

SEQ ID NO: 1438 - DNA, 70 bp, synthetic construct
  misc_feature 1..70: note = Synthetic: 1648_Bushbaby_diMut_AT21CG_n1
  source 1..70: mol_type = other DNA
gggggaagctactggtgaatcgtaaccaaggtcacccagttatcagggagcaaacaggagctaagtccat

SEQ ID NO: 1439 - DNA, 70 bp, synthetic construct
  misc_feature 1..70: note = Synthetic: 1652_Bushbaby_diMut_AT21TA_n1
  source 1..70: mol_type = other DNA
gggggaagctactggtgaattataaccaaggtcacccagttatcagggagcaaacaggagctaagtccat

SEQ ID NO: 1440 - DNA, 70 bp, synthetic construct
  misc_feature 1..70: note = Synthetic: 1653_Bushbaby_diMut_AT21TC_n1
  source 1..70: mol_type = other DNA
gggggaagctactggtgaattctaaccaaggtcacccagttatcagggagcaaacaggagctaagtccat

SEQ ID NO: 1441 - DNA, 70 bp, synthetic construct
  misc_feature 1..70: note = Synthetic: 1669_Bushbaby_diMut_TA23CT_n1
  source 1..70: mol_type = other DNA
gggggaagctactggtgaatatctaccaaggtcacccagttatcagggagcaaacaggagctaagtccat

SEQ ID NO: 1442 - DNA, 70 bp, synthetic construct
  misc_feature 1..70: note = Synthetic: 1673_Bushbaby_diMut_AA24CC_n1
  source 1..70: mol_type = other DNA
gggggaagctactggtgaatattccccaaggtcacccagttatcagggagcaaacaggagctaagtccat

SEQ ID NO: 1443 - DNA, 70 bp, synthetic construct
  misc_feature 1..70: note = Synthetic: 1681_Bushbaby_diMut_AA24TT_n1
  source 1..70: mol_type = other DNA
gggggaagctactggtgaatattttccaaggtcacccagttatcagggagcaaacaggagctaagtccat

SEQ ID NO: 1444 - DNA, 70 bp, synthetic construct
  misc_feature 1..70: note = Synthetic: 1684_Bushbaby_diMut_AC25CT_n1
  source 1..70: mol_type = other DNA
gggggaagctactggtgaatattactcaaggtcacccagttatcagggagcaaacaggagctaagtccat

SEQ ID NO: 1445 - DNA, 70 bp, synthetic construct
  misc_feature 1..70: note = Synthetic: 1686_Bushbaby_diMut_AC25GG_n1
  source 1..70: mol_type = other DNA
gggggaagctactggtgaatattaggcaaggtcacccagttatcagggagcaaacaggagctaagtccat

SEQ ID NO: 1446 - DNA, 70 bp, synthetic construct
  misc_feature 1..70: note = Synthetic: 1690_Bushbaby_diMut_AC25TT_n1
  source 1..70: mol_type = other DNA
gggggaagctactggtgaatattattcaaggtcacccagttatcagggagcaaacaggagctaagtccat

SEQ ID NO: 1447 - DNA, 70 bp, synthetic construct
  misc_feature 1..70: note = Synthetic: 1716_Bushbaby_diMut_AA28TG_n1
  source 1..70: mol_type = other DNA
gggggaagctactggtgaatattaacctgggtcacccagttatcagggagcaaacaggagctaagtccat

SEQ ID NO: 1448 - DNA, 70 bp, synthetic construct
  misc_feature 1..70: note = Synthetic: 1727_Bushbaby_diMut_GG30AA_n1
  source 1..70: mol_type = other DNA
gggggaagctactggtgaatattaaccaaaatcacccagttatcagggagcaaacaggagctaagtccat

SEQ ID NO: 1449 - DNA, 70 bp, synthetic construct
  misc_feature 1..70: note = Synthetic: 1747_Bushbaby_diMut_TC32AT_n1
  source 1..70: mol_type = other DNA
gggggaagctactggtgaatattaaccaaggatacccagttatcagggagcaaacaggagctaagtccat

SEQ ID NO: 1450 - DNA, 70 bp, synthetic construct
  misc_feature 1..70: note = Synthetic: 1758_Bushbaby_diMut_CA33GG_n1
  source 1..70: mol_type = other DNA
gggggaagctactggtgaatattaaccaaggtggcccagttatcagggagcaaacaggagctaagtccat

SEQ ID NO: 1451 - DNA, 70 bp, synthetic construct
  misc_feature 1..70: note = Synthetic: 1761_Bushbaby_diMut_CA33TG_n1
  source 1..70: mol_type = other DNA
gggggaagctactggtgaatattaaccaaggttgcccagttatcagggagcaaacaggagctaagtccat

SEQ ID NO: 1452 - DNA, 70 bp, synthetic construct
  misc_feature 1..70: note = Synthetic: 1768_Bushbaby_diMut_AC34GT_n1
  source 1..70: mol_type = other DNA
gggggaagctactggtgaatattaaccaaggtcgtccagttatcagggagcaaacaggagctaagtccat

SEQ ID NO: 1453 - DNA, 70 bp, synthetic construct
  misc_feature 1..70: note = Synthetic: 1772_Bushbaby_diMut_CC35AA_n1
  source 1..70: mol_type = other DNA
gggggaagctactggtgaatattaaccaaggtcaaacagttatcagggagcaaacaggagctaagtccat

SEQ ID NO: 1454 - DNA, 70 bp, synthetic construct
  misc_feature 1..70: note = Synthetic: 1780_Bushbaby_diMut_CC35TT_n1
  source 1..70: mol_type = other DNA
gggggaagctactggtgaatattaaccaaggtcattcagttatcagggagcaaacaggagctaagtccat

SEQ ID NO: 1455 - DNA, 70 bp, synthetic construct
  misc_feature 1..70: note = Synthetic: 1785_Bushbaby_diMut_CC36GG_n1
  source 1..70: mol_type = other DNA
gggggaagctactggtgaatattaaccaaggtcacggagttatcagggagcaaacaggagctaagtccat

SEQ ID NO: 1456 - DNA, 70 bp, synthetic construct
  misc_feature 1..70: note = Synthetic: 1786_Bushbaby_diMut_CC36GT_n1
  source 1..70: mol_type = other DNA
gggggaagctactggtgaatattaaccaaggtcacgtagttatcagggagcaaacaggagctaagtccat

SEQ ID NO: 1457 - DNA, 70 bp, synthetic construct
  misc_feature 1..70: note = Synthetic: 1787_Bushbaby_diMut_CC36TA_n1
  source 1..70: mol_type = other DNA
gggggaagctactggtgaatattaaccaaggtcactaagttatcagggagcaaacaggagctaagtccat

SEQ ID NO: 1458 - DNA, 70 bp, synthetic construct
  misc_feature 1..70: note = Synthetic: 1792_Bushbaby_diMut_CA37AT_n1
  source 1..70: mol_type = other DNA
gggggaagctactggtgaatattaaccaaggtcaccatgttatcagggagcaaacaggagctaagtccat

SEQ ID NO: 1459 - DNA, 70 bp, synthetic construct
  misc_feature 1..70: note = Synthetic: 1798_Bushbaby_diMut_CA37TT_n1
  source 1..70: mol_type = other DNA
gggggaagctactggtgaatattaaccaaggtcaccttgttatcagggagcaaacaggagctaagtccat

SEQ ID NO: 1460 - DNA, 70 bp, synthetic construct
  misc_feature 1..70: note = Synthetic: 1800_Bushbaby_diMut_AG38CC_n1
  source 1..70: mol_type = other DNA
gggggaagctactggtgaatattaaccaaggtcacccccttatcagggagcaaacaggagctaagtccat

SEQ ID NO: 1461 - DNA, 70 bp, synthetic construct
  misc_feature 1..70: note = Synthetic: 1802_Bushbaby_diMut_AG38GA_n1
  source 1..70: mol_type = other DNA
gggggaagctactggtgaatattaaccaaggtcacccgattatcagggagcaaacaggagctaagtccat

SEQ ID NO: 1462 - DNA, 70 bp, synthetic construct
  misc_feature 1..70: note = Synthetic: 1807_Bushbaby_diMut_AG38TT_n1
  source 1..70: mol_type = other DNA
gggggaagctactggtgaatattaaccaaggtcacccttttatcagggagcaaacaggagctaagtccat

SEQ ID NO: 1463 - DNA, 70 bp, synthetic construct
  misc_feature 1..70: note = Synthetic: 1809_Bushbaby_diMut_GT39AC_n1
  source 1..70: mol_type = other DNA
gggggaagctactggtgaatattaaccaaggtcacccaactatcagggagcaaacaggagctaagtccat

SEQ ID NO: 1464 - DNA, 70 bp, synthetic construct
  misc_feature 1..70: note = Synthetic: 1810_Bushbaby_diMut_GT39AG_n1
  source 1..70: mol_type = other DNA
gggggaagctactggtgaatattaaccaaggtcacccaagtatcagggagcaaacaggagctaagtccat

SEQ ID NO: 1465 - DNA, 70 bp, synthetic construct
  misc_feature 1..70: note = Synthetic: 1813_Bushbaby_diMut_GT39CG_n1
  source 1..70: mol_type = other DNA
gggggaagctactggtgaatattaaccaaggtcacccacgtatcagggagcaaacaggagctaagtccat

SEQ ID NO: 1466 - DNA, 70 bp, synthetic construct
  misc_feature 1..70: note = Synthetic: 1816_Bushbaby_diMut_GT39TG_n1
  source 1..70: mol_type = other DNA
gggggaagctactggtgaatattaaccaaggtcacccatgtatcagggagcaaacaggagctaagtccat

SEQ ID NO: 1467 - DNA, 70 bp, synthetic construct
  misc_feature 1..70: note = Synthetic: 1818_Bushbaby_diMut_TT40AC_n1
  source 1..70: mol_type = other DNA
gggggaagctactggtgaatattaaccaaggtcacccagacatcagggagcaaacaggagctaagtccat

SEQ ID NO: 1468 - DNA, 70 bp, synthetic construct
  misc_feature 1..70: note = Synthetic: 1822_Bushbaby_diMut_TT40CG_n1
  source 1..70: mol_type = other DNA
gggggaagctactggtgaatattaaccaaggtcacccagcgatcagggagcaaacaggagctaagtccat

SEQ ID NO: 1469 - DNA, 70 bp, synthetic construct
  misc_feature 1..70: note = Synthetic: 1833_Bushbaby_diMut_TA41GG_n1
  source 1..70: mol_type = other DNA
gggggaagctactggtgaatattaaccaaggtcacccagtggtcagggagcaaacaggagctaagtccat

SEQ ID NO: 1470 - DNA, 70 bp, synthetic construct
  misc_feature 1..70: note = Synthetic: 1835_Bushbaby_diMut_AT42CA_n1
  source 1..70: mol_type = other DNA
gggggaagctactggtgaatattaaccaaggtcacccagttcacagggagcaaacaggagctaagtccat

SEQ ID NO: 1471 - DNA, 70 bp, synthetic construct
  misc_feature 1..70: note = Synthetic: 1837_Bushbaby_diMut_AT42CG_n1
  source 1..70: mol_type = other DNA
gggggaagctactggtgaatattaaccaaggtcacccagttcgcagggagcaaacaggagctaagtccat

SEQ ID NO: 1472 - DNA, 70 bp, synthetic construct
  misc_feature 1..70: note = Synthetic: 1839_Bushbaby_diMut_AT42GC_n1
  source 1..70: mol_type = other DNA
gggggaagctactggtgaatattaaccaaggtcacccagttgccagggagcaaacaggagctaagtccat

SEQ ID NO: 1473 - DNA, 70 bp, synthetic construct
  misc_feature 1..70: note = Synthetic: 1849_Bushbaby_diMut_TC43CT_n1
  source 1..70: mol_type = other DNA
gggggaagctactggtgaatattaaccaaggtcacccagttactagggagcaaacaggagctaagtccat

SEQ ID NO: 1474 - DNA, 70 bp, synthetic construct
  misc_feature 1..70: note = Synthetic: 1851_Bushbaby_diMut_TC43GG_n1
  source 1..70: mol_type = other DNA
gggggaagctactggtgaatattaaccaaggtcacccagttaggagggagcaaacaggagctaagtccat

SEQ ID NO: 1475 - DNA, 70 bp, synthetic construct
  misc_feature 1..70: note = Synthetic: 1856_Bushbaby_diMut_CA44GC_n1
  source 1..70: mol_type = other DNA
gggggaagctactggtgaatattaaccaaggtcacccagttatgcgggagcaaacaggagctaagtccat

SEQ ID NO: 1476 - DNA, 70 bp, synthetic construct
  misc_feature 1..70: note = Synthetic: 1871_Bushbaby_diMut_GG46AA_n1
  source 1..70: mol_type = other DNA
gggggaagctactggtgaatattaaccaaggtcacccagttatcaaagagcaaacaggagctaagtccat

SEQ ID NO: 1477 - DNA, 70 bp, synthetic construct
  misc_feature 1..70: note = Synthetic: 1873_Bushbaby_diMut_GG46AT_n1
  source 1..70: mol_type = other DNA
gggggaagctactggtgaatattaaccaaggtcacccagttatcaatgagcaaacaggagctaagtccat

SEQ ID NO: 1478 - DNA, 70 bp, synthetic construct
  misc_feature 1..70: note = Synthetic: 1874_Bushbaby_diMut_GG46CA_n1
  source 1..70: mol_type = other DNA
gggggaagctactggtgaatattaaccaaggtcacccagttatcacagagcaaacaggagctaagtccat

SEQ ID NO: 1479 - DNA, 70 bp, synthetic construct
  misc_feature 1..70: note = Synthetic: 1875_Bushbaby_diMut_GG46CC_n1
  source 1..70: mol_type = other DNA
gggggaagctactggtgaatattaaccaaggtcacccagttatcaccgagcaaacaggagctaagtccat

SEQ ID NO: 1480 - DNA, 70 bp, synthetic construct
  misc_feature 1..70: note = Synthetic: 1877_Bushbaby_diMut_GG46TA_n1
  source 1..70: mol_type = other DNA
gggggaagctactggtgaatattaaccaaggtcacccagttatcatagagcaaacaggagctaagtccat

SEQ ID NO: 1481 - DNA, 70 bp, synthetic construct
  misc_feature 1..70: note = Synthetic: 1879_Bushbaby_diMut_GG46TT_n1
  source 1..70: mol_type = other DNA
gggggaagctactggtgaatattaaccaaggtcacccagttatcattgagcaaacaggagctaagtccat

SEQ ID NO: 1482 - DNA, 70 bp, synthetic construct
  misc_feature 1..70: note = Synthetic: 1880_Bushbaby_diMut_GG47AA_n1
  source 1..70: mol_type = other DNA
gggggaagctactggtgaatattaaccaaggtcacccagttatcagaaagcaaacaggagctaagtccat

SEQ ID NO: 1483 - DNA, 70 bp, synthetic construct
  misc_feature 1..70: note = Synthetic: 1881_Bushbaby_diMut_GG47AC_n1
  source 1..70: mol_type = other DNA
gggggaagctactggtgaatattaaccaaggtcacccagttatcagacagcaaacaggagctaagtccat

SEQ ID NO: 1484 - DNA, 70 bp, synthetic construct
  misc_feature 1..70: note = Synthetic: 1882_Bushbaby_diMut_GG47AT_n1
  source 1..70: mol_type = other DNA
gggggaagctactggtgaatattaaccaaggtcacccagttatcagatagcaaacaggagctaagtccat

SEQ ID NO: 1485 - DNA, 70 bp, synthetic construct
  misc_feature 1..70: note = Synthetic: 1883_Bushbaby_diMut_GG47CA_n1
  source 1..70: mol_type = other DNA
gggggaagctactggtgaatattaaccaaggtcacccagttatcagcaagcaaacaggagctaagtccat

SEQ ID NO: 1486 - DNA, 70 bp, synthetic construct
  misc_feature 1..70: note = Synthetic: 1884_Bushbaby_diMut_GG47CC_n1
  source 1..70: mol_type = other DNA
gggggaagctactggtgaatattaaccaaggtcacccagttatcagccagcaaacaggagctaagtccat

SEQ ID NO: 1487 - DNA, 70 bp, synthetic construct
  misc_feature 1..70: note = Synthetic: 1888_Bushbaby_diMut_GG47TT_n1
  source 1..70: mol_type = other DNA
gggggaagctactggtgaatattaaccaaggtcacccagttatcagttagcaaacaggagctaagtccat

SEQ ID NO: 1488 - DNA, 70 bp, synthetic construct
  misc_feature 1..70: note = Synthetic: 1890_Bushbaby_diMut_GA48AG_n1
  source 1..70: mol_type = other DNA
gggggaagctactggtgaatattaaccaaggtcacccagttatcaggaggcaaacaggagctaagtccat

SEQ ID NO: 1489 - DNA, 70 bp, synthetic construct
  misc_feature 1..70: note = Synthetic: 1909_Bushbaby_diMut_GC50AT_n1
  source 1..70: mol_type = other DNA
gggggaagctactggtgaatattaaccaaggtcacccagttatcagggaataaacaggagctaagtccat

SEQ ID NO: 1490 - DNA, 70 bp, synthetic construct
  misc_feature 1..70: note = Synthetic: 1918_Bushbaby_diMut_CA51AT_n1
  source 1..70: mol_type = other DNA
gggggaagctactggtgaatattaaccaaggtcacccagttatcagggagataacaggagctaagtccat

SEQ ID NO: 1491 - DNA, 70 bp, synthetic construct
  misc_feature 1..70: note = Synthetic: 1953_Bushbaby_diMut_CA55AG_n1
  source 1..70: mol_type = other DNA
gggggaagctactggtgaatattaaccaaggtcacccagttatcagggagcaaaagggagctaagtccat

SEQ ID NO: 1492 - DNA, 70 bp, synthetic construct
  misc_feature 1..70: note = Synthetic: 1959_Bushbaby_diMut_CA55TG_n1
  source 1..70: mol_type = other DNA
gggggaagctactggtgaatattaaccaaggtcacccagttatcagggagcaaatgggagctaagtccat

SEQ ID NO: 1493 - DNA, 70 bp, synthetic construct
  misc_feature 1..70: note = Synthetic: 1988_Bushbaby_diMut_AG59CA_n1
  source 1..70: mol_type = other DNA
gggggaagctactggtgaatattaaccaaggtcacccagttatcagggagcaaacaggcactaagtccat

SEQ ID NO: 1494 - DNA, 70 bp, synthetic construct
  misc_feature 1..70: note = Synthetic: 1992_Bushbaby_diMut_AG59GC_n1
  source 1..70: mol_type = other DNA
gggggaagctactggtgaatattaaccaaggtcacccagttatcagggagcaaacagggcctaagtccat

SEQ ID NO: 1495 - DNA, 70 bp, synthetic construct
  misc_feature 1..70: note = Synthetic: 1993_Bushbaby_diMut_AG59GT_n1
  source 1..70: mol_type = other DNA
gggggaagctactggtgaatattaaccaaggtcacccagttatcagggagcaaacagggtctaagtccat

SEQ ID NO: 1496 - DNA, 70 bp, synthetic construct
  misc_feature 1..70: note = Synthetic: 1994_Bushbaby_diMut_AG59TA_n1
  source 1..70: mol_type = other DNA
gggggaagctactggtgaatattaaccaaggtcacccagttatcagggagcaaacaggtactaagtccat

SEQ ID NO: 1497 - DNA, 70 bp, synthetic construct
  misc_feature 1..70: note = Synthetic: 1995_Bushbaby_diMut_AG59TC_n1
  source 1..70: mol_type = other DNA
gggggaagctactggtgaatattaaccaaggtcacccagttatcagggagcaaacaggtcctaagtccat

SEQ ID NO: 1498 - DNA, 70 bp, synthetic construct
  misc_feature 1..70: note = Synthetic: 2004_Bushbaby_diMut_GC60TG_n1
  source 1..70: mol_type = other DNA
gggggaagctactggtgaatattaaccaaggtcacccagttatcagggagcaaacaggatgtaagtccat

SEQ ID NO: 1499 - DNA, 70 bp, synthetic construct
  misc_feature 1..70: note = Synthetic: 2012_Bushbaby_diMut_CT61TA_n1
  source 1..70: mol_type = other DNA
gggggaagctactggtgaatattaaccaaggtcacccagttatcagggagcaaacaggagtaaagtccat

SEQ ID NO: 1500 - DNA, 70 bp, synthetic construct
  misc_feature 1..70: note = Synthetic: 2016_Bushbaby_diMut_TA62AG_n1
  source 1..70: mol_type = other DNA
gggggaagctactggtgaatattaaccaaggtcacccagttatcagggagcaaacaggagcagagtccat

SEQ ID NO: 1501 - DNA, 70 bp, synthetic construct
  misc_feature 1..70: note = Synthetic: 2017_Bushbaby_diMut_TA62AT_n1
  source 1..70: mol_type = other DNA
gggggaagctactggtgaatattaaccaaggtcacccagttatcagggagcaaacaggagcatagtccat

SEQ ID NO: 1502 - DNA, 70 bp, synthetic construct
  misc_feature 1..70: note = Synthetic: 2022_Bushbaby_diMut_TA62GG_n1
  source 1..70: mol_type = other DNA
gggggaagctactggtgaatattaaccaaggtcacccagttatcagggagcaaacaggagcggagtccat

SEQ ID NO: 1503 - DNA, 70 bp, synthetic construct
  misc_feature 1..70: note = Synthetic: 2053_Bushbaby_diMut_TC66AT_n1
  source 1..70: mol_type = other DNA
gggggaagctactggtgaatattaaccaaggtcacccagttatcagggagcaaacaggagctaagatcat

SEQ ID NO: 1504 - DNA, 70 bp, synthetic construct
  misc_feature 1..70: note = Synthetic: 2056_Bushbaby_diMut_TC66CT_n1
  source 1..70: mol_type = other DNA
gggggaagctactggtgaatattaaccaaggtcacccagttatcagggagcaaacaggagctaagctcat

SEQ ID NO: 1505 - DNA, 70 bp, synthetic construct
  misc_feature 1..70: note = Synthetic: 2059_Bushbaby_diMut_TC66GT_n1
  source 1..70: mol_type = other DNA
gggggaagctactggtgaatattaaccaaggtcacccagttatcagggagcaaacaggagctaaggtcat

SEQ ID NO: 1506 - DNA, 70 bp, synthetic construct
  misc_feature 1..70: note = Synthetic: 2060_Bushbaby_diMut_CC67AA_n1
  source 1..70: mol_type = other DNA
gggggaagctactggtgaatattaaccaaggtcacccagttatcagggagcaaacaggagctaagtaaat

SEQ ID NO: 1507 - DNA, 72 bp, synthetic construct
  misc_feature 1..72: note = Synthetic: 3310_HNF4_FOXA_monoMut_G2C_n1
  source 1..72: mol_type = other DNA
gcgggaggctgctggtaaacattaaccaaggtcaccccagttatcagaggagcaaacaggggcaaagtccac

SEQ ID NO: 1508 - DNA, 72 bp, synthetic construct
  misc_feature 1..72: note = Synthetic: 3312_HNF4_FOXA_monoMut_G3A_n1
  source 1..72: mol_type = other DNA
ggaggaggctgctggtaaacattaaccaaggtcaccccagttatcagaggagcaaacaggggcaaagtccac

SEQ ID NO: 1509 - DNA, 72 bp, synthetic construct
  misc_feature 1..72: note = Synthetic: 3315_HNF4_FOXA_monoMut_G4A_n1
  source 1..72: mol_type = other DNA
gggagaggctgctggtaaacattaaccaaggtcaccccagttatcagaggagcaaacaggggcaaagtccac

SEQ ID NO: 1510 - DNA, 72 bp, synthetic construct
  misc_feature 1..72: note = Synthetic: 3316_HNF4_FOXA_monoMut_G4C_n1
  source 1..72: mol_type = other DNA
gggcgaggctgctggtaaacattaaccaaggtcaccccagttatcagaggagcaaacaggggcaaagtccac

SEQ ID NO: 1511 - DNA, 72 bp, synthetic construct
  misc_feature 1..72: note = Synthetic: 3333_HNF4_FOXA_monoMut_T10A_n1
  source 1..72: mol_type = other DNA
gggggaggcagctggtaaacattaaccaaggtcaccccagttatcagaggagcaaacaggggcaaagtccac

SEQ ID NO: 1512 - DNA, 72 bp, synthetic construct
  misc_feature 1..72: note = Synthetic: 3334_HNF4_FOXA_monoMut_T10C_n1
  source 1..72: mol_type = other DNA
gggggaggccgctggtaaacattaaccaaggtcaccccagttatcagaggagcaaacaggggcaaagtccac

SEQ ID NO: 1513 - DNA, 72 bp, synthetic construct
  misc_feature 1..72: note = Synthetic: 3341_HNF4_FOXA_monoMut_C12T_n1
  source 1..72: mol_type = other DNA
gggggaggctgttggtaaacattaaccaaggtcaccccagttatcagaggagcaaacaggggcaaagtccac

SEQ ID NO: 1514 - DNA, 72 bp, synthetic construct
  misc_feature 1..72: note = Synthetic: 3342_HNF4_FOXA_monoMut_T13A_n1
  source 1..72: mol_type = other DNA
gggggaggctgcaggtaaacattaaccaaggtcaccccagttatcagaggagcaaacaggggcaaagtccac

SEQ ID NO: 1515 - DNA, 72 bp, synthetic construct
  misc_feature 1..72: note = Synthetic: 3343_HNF4_FOXA_monoMut_T13C_n1
  source 1..72: mol_type = other DNA
gggggaggctgccggtaaacattaaccaaggtcaccccagttatcagaggagcaaacaggggcaaagtccac

SEQ ID NO: 1516 - DNA, 72 bp, synthetic construct
  misc_feature 1..72: note = Synthetic: 3345_HNF4_FOXA_monoMut_G14A_n1
  source 1..72: mol_type = other DNA
gggggaggctgctagtaaacattaaccaaggtcaccccagttatcagaggagcaaacaggggcaaagtccac

SEQ ID NO: 1517 - DNA, 72 bp, synthetic construct
  misc_feature 1..72: note = Synthetic: 3362_HNF4_FOXA_monoMut_A19T_n1
  source 1..72: mol_type = other DNA
gggggaggctgctggtaatcattaaccaaggtcaccccagttatcagaggagcaaacaggggcaaagtccac

SEQ ID NO: 1518 - DNA, 72 bp, synthetic construct
  misc_feature 1..72: note = Synthetic: 3369_HNF4_FOXA_monoMut_T22A_n1
  source 1..72: mol_type = other DNA
gggggaggctgctggtaaacaataaccaaggtcaccccagttatcagaggagcaaacaggggcaaagtccac

SEQ ID NO: 1519 - DNA, 72 bp, synthetic construct
  misc_feature 1..72: note = Synthetic: 3373_HNF4_FOXA_monoMut_T23C_n1
  source 1..72: mol_type = other DNA
gggggaggctgctggtaaacatcaaccaaggtcaccccagttatcagaggagcaaacaggggcaaagtccac

SEQ ID NO: 1520 - DNA, 72 bp, synthetic construct
  misc_feature 1..72: note = Synthetic: 3375_HNF4_FOXA_monoMut_A24C_n1
  source 1..72: mol_type = other DNA
gggggaggctgctggtaaacattcaccaaggtcaccccagttatcagaggagcaaacaggggcaaagtccac

SEQ ID NO: 1521 - DNA, 72 bp, synthetic construct
  misc_feature 1..72: note = Synthetic: 3376_HNF4_FOXA_monoMut_A24G_n1
  source 1..72: mol_type = other DNA
gggggaggctgctggtaaacattgaccaaggtcaccccagttatcagaggagcaaacaggggcaaagtccac

SEQ ID NO: 1522 - DNA, 72 bp, synthetic construct
  misc_feature 1..72: note = Synthetic: 3379_HNF4_FOXA_monoMut_A25G_n1
  source 1..72: mol_type = other DNA
gggggaggctgctggtaaacattagccaaggtcaccccagttatcagaggagcaaacaggggcaaagtccac

SEQ ID NO: 1523 - DNA, 72 bp, synthetic construct
  misc_feature 1..72: note = Synthetic: 3383_HNF4_FOXA_monoMut_C26T_n1
  source 1..72: mol_type = other DNA
gggggaggctgctggtaaacattaatcaaggtcaccccagttatcagaggagcaaacaggggcaaagtccac

SEQ ID NO: 1524 - DNA, 72 bp, synthetic construct
  misc_feature 1..72: note = Synthetic: 3386_HNF4_FOXA_monoMut_C27T_n1
  source 1..72: mol_type = other DNA
gggggaggctgctggtaaacattaactaaggtcaccccagttatcagaggagcaaacaggggcaaagtccac

SEQ ID NO: 1525 - DNA, 72 bp, synthetic construct
  misc_feature 1..72: note = Synthetic: 3408_HNF4_FOXA_monoMut_C35A_n1
  source 1..72: mol_type = other DNA
gggggaggctgctggtaaacattaaccaaggtcaacccagttatcagaggagcaaacaggggcaaagtccac

SEQ ID NO: 1526 - DNA, 72 bp, synthetic construct
  misc_feature 1..72: note = Synthetic: 3409_HNF4_FOXA_monoMut_C35G_n1
  source 1..72: mol_type = other DNA
gggggaggctgctggtaaacattaaccaaggtcagcccagttatcagaggagcaaacaggggcaaagtccac

SEQ ID NO: 1527 - DNA, 72 bp, synthetic construct
  misc_feature 1..72: note = Synthetic: 3410_HNF4_FOXA_monoMut_C35T_n1
  source 1..72: mol_type = other DNA
gggggaggctgctggtaaacattaaccaaggtcatcccagttatcagaggagcaaacaggggcaaagtccac

SEQ ID NO: 1528 - DNA, 72 bp, synthetic construct
  misc_feature 1..72: note = Synthetic: 3413_HNF4_FOXA_monoMut_C36T_n1
  source 1..72: mol_type = other DNA
gggggaggctgctggtaaacattaaccaaggtcactccagttatcagaggagcaaacaggggcaaagtccac

SEQ ID NO: 1529 - DNA, 72 bp, synthetic construct
  misc_feature 1..72: note = Synthetic: 3415_HNF4_FOXA_monoMut_C37G_n1
  source 1..72: mol_type = other DNA
gggggaggctgctggtaaacattaaccaaggtcaccgcagttatcagaggagcaaacaggggcaaagtccac

SEQ ID NO: 1530 - DNA, 72 bp, synthetic construct
  misc_feature 1..72: note = Synthetic: 3416_HNF4_FOXA_monoMut_C37T_n1
  source 1..72: mol_type = other DNA
gggggaggctgctggtaaacattaaccaaggtcacctcagttatcagaggagcaaacaggggcaaagtccac

SEQ ID NO: 1531 - DNA, 72 bp, synthetic construct
  misc_feature 1..72: note = Synthetic: 3418_HNF4_FOXA_monoMut_C38G_n1
  source 1..72: mol_type = other DNA
gggggaggctgctggtaaacattaaccaaggtcacccgagttatcagaggagcaaacaggggcaaagtccac

SEQ ID NO: 1532 - DNA, 72 bp, synthetic construct
  misc_feature 1..72: note = Synthetic: 3420_HNF4_FOXA_monoMut_A39C_n1
  source 1..72: mol_type = other DNA
gggggaggctgctggtaaacattaaccaaggtcacccccgttatcagaggagcaaacaggggcaaagtccac

SEQ ID NO: 1533 - DNA, 72 bp, synthetic construct
  misc_feature 1..72: note = Synthetic: 3421_HNF4_FOXA_monoMut_A39G_n1
  source 1..72: mol_type = other DNA
gggggaggctgctggtaaacattaaccaaggtcaccccggttatcagaggagcaaacaggggcaaagtccac

SEQ ID NO: 1534 - DNA, 72 bp, synthetic construct
  misc_feature 1..72: note = Synthetic: 3422_HNF4_FOXA_monoMut_A39T_n1
  source 1..72: mol_type = other DNA
gggggaggctgctggtaaacattaaccaaggtcacccctgttatcagaggagcaaacaggggcaaagtccac

SEQ ID NO: 1535 - DNA, 72 bp, synthetic construct
  misc_feature 1..72: note = Synthetic: 3423_HNF4_FOXA_monoMut_G40A_n1
  source 1..72: mol_type = other DNA
gggggaggctgctggtaaacattaaccaaggtcaccccaattatcagaggagcaaacaggggcaaagtccac

SEQ ID NO: 1536 - DNA, 72 bp, synthetic construct
  misc_feature 1..72: note = Synthetic: 3427_HNF4_FOXA_monoMut_T41C_n1
  source 1..72: mol_type = other DNA
gggggaggctgctggtaaacattaaccaaggtcaccccagctatcagaggagcaaacaggggcaaagtccac

SEQ ID NO: 1537 - DNA, 72 bp, synthetic construct
  misc_feature 1..72: note = Synthetic: 3440_HNF4_FOXA_monoMut_C45T_n1
  source 1..72: mol_type = other DNA
gggggaggctgctggtaaacattaaccaaggtcaccccagttattagaggagcaaacaggggcaaagtccac

SEQ ID NO: 1538 - DNA, 72 bp, synthetic construct
  misc_feature 1..72: note = Synthetic: 3445_HNF4_FOXA_monoMut_G47C_n1
  source 1..72: mol_type = other DNA
gggggaggctgctggtaaacattaaccaaggtcaccccagttatcacaggagcaaacaggggcaaagtccac

SEQ ID NO: 1539 - DNA, 72 bp, synthetic construct
  misc_feature 1..72: note = Synthetic: 3446_HNF4_FOXA_monoMut_G47T_n1
  source 1..72: mol_type = other DNA
gggggaggctgctggtaaacattaaccaaggtcaccccagttatcataggagcaaacaggggcaaagtccac

SEQ ID NO: 1540 - DNA, 72 bp, synthetic construct
  misc_feature 1..72: note = Synthetic: 3447_HNF4_FOXA_monoMut_A48C_n1
  source 1..72: mol_type = other DNA
gggggaggctgctggtaaacattaaccaaggtcaccccagttatcagcggagcaaacaggggcaaagtccac

SEQ ID NO: 1541 - DNA, 72 bp, synthetic construct
  misc_feature 1..72: note = Synthetic: 3453_HNF4_FOXA_monoMut_G50A_n1
  source 1..72: mol_type = other DNA
gggggaggctgctggtaaacattaaccaaggtcaccccagttatcagagaagcaaacaggggcaaagtccac

SEQ ID NO: 1542 - DNA, 72 bp, synthetic construct
  misc_feature 1..72: note = Synthetic: 3456_HNF4_FOXA_monoMut_A51C_n1
  source 1..72: mol_type = other DNA
gggggaggctgctggtaaacattaaccaaggtcaccccagttatcagaggcgcaaacaggggcaaagtccac

SEQ ID NO: 1543 - DNA, 72 bp, synthetic construct
  misc_feature 1..72: note = Synthetic: 3459_HNF4_FOXA_monoMut_G52A_n1
  source 1..72: mol_type = other DNA
gggggaggctgctggtaaacattaaccaaggtcaccccagttatcagaggaacaaacaggggcaaagtccac

SEQ ID NO: 1544 - DNA, 72 bp, synthetic construct
  misc_feature 1..72: note = Synthetic: 3460_HNF4_FOXA_monoMut_G52C_n1
  source 1..72: mol_type = other DNA
gggggaggctgctggtaaacattaaccaaggtcaccccagttatcagaggaccaaacaggggcaaagtccac

SEQ ID NO: 1545 - DNA, 72 bp, synthetic construct
  misc_feature 1..72: note = Synthetic: 3461_HNF4_FOXA_monoMut_G52T_n1
  source 1..72: mol_type = other DNA
gggggaggctgctggtaaacattaaccaaggtcaccccagttatcagaggatcaaacaggggcaaagtccac

SEQ ID NO: 1546 - DNA, 72 bp, synthetic construct
  misc_feature 1..72: note = Synthetic: 3464_HNF4_FOXA_monoMut_C53T_n1
  source 1..72: mol_type = other DNA
gggggaggctgctggtaaacattaaccaaggtcaccccagttatcagaggagtaaacaggggcaaagtccac

SEQ ID NO: 1547 - DNA, 72 bp, synthetic construct
  misc_feature 1..72: note = Synthetic: 3467_HNF4_FOXA_monoMut_A54T_n1
  source 1..72: mol_type = other DNA
gggggaggctgctggtaaacattaaccaaggtcaccccagttatcagaggagctaacaggggcaaagtccac

SEQ ID NO: 1548 - DNA, 72 bp, synthetic construct
  misc_feature 1..72: note = Synthetic: 3478_HNF4_FOXA_monoMut_A58G_n1
  source 1..72: mol_type = other DNA
gggggaggctgctggtaaacattaaccaaggtcaccccagttatcagaggagcaaacgggggcaaagtccac

SEQ ID NO: 1549 - DNA, 72 bp, synthetic construct
  misc_feature 1..72: note = Synthetic: 3488_HNF4_FOXA_monoMut_G61T_n1
  source 1..72: mol_type = other DNA
gggggaggctgctggtaaacattaaccaaggtcaccccagttatcagaggagcaaacaggtgcaaagtccac

SEQ ID NO: 1550 - DNA, 72 bp, synthetic construct
  misc_feature 1..72: note = Synthetic: 3512_HNF4_FOXA_monoMut_C69T_n1
  source 1..72: mol_type = other DNA
gggggaggctgctggtaaacattaaccaaggtcaccccagttatcagaggagcaaacaggggcaaagttcac

SEQ ID NO: 1551 - DNA, 72 bp, synthetic construct
  misc_feature 1..72: note = Synthetic: 3519_HNF4_FOXA_monoMut_C72A_n1
  source 1..72: mol_type = other DNA
gggggaggctgctggtaaacattaaccaaggtcaccccagttatcagaggagcaaacaggggcaaagtccaa

SEQ ID NO: 1552 - DNA, 72 bp, synthetic construct
  misc_feature 1..72: note = Synthetic: 3521_HNF4_FOXA_monoMut_C72T_n1
  source 1..72: mol_type = other DNA
gggggaggctgctggtaaacattaaccaaggtcaccccagttatcagaggagcaaacaggggcaaagtccat

SEQ ID NO: 1553 - DNA, 72 bp, synthetic construct
  misc_feature 1..72: note = Synthetic: 3523_HNF4_FOXA_diMut_GG1AC_n1
  source 1..72: mol_type = other DNA
acgggaggctgctggtaaacattaaccaaggtcaccccagttatcagaggagcaaacaggggcaaagtccac

SEQ ID NO: 1554 - DNA, 72 bp, synthetic construct
  misc_feature 1..72: note = Synthetic: 3526_HNF4_FOXA_diMut_GG1CC_n1
  source 1..72: mol_type = other DNA
ccgggaggctgctggtaaacattaaccaaggtcaccccagttatcagaggagcaaacaggggcaaagtccac

SEQ ID NO: 1555 - DNA, 72 bp, synthetic construct
  misc_feature 1..72: note = Synthetic: 3532_HNF4_FOXA_diMut_GG2AC_n1
  source 1..72: mol_type = other DNA
gacggaggctgctggtaaacattaaccaaggtcaccccagttatcagaggagcaaacaggggcaaagtccac

SEQ ID NO: 1556 - DNA, 72 bp, synthetic construct
  misc_feature 1..72: note = Synthetic: 3535_HNF4_FOXA_diMut_GG2CC_n1
  source 1..72: mol_type = other DNA
gccggaggctgctggtaaacattaaccaaggtcaccccagttatcagaggagcaaacaggggcaaagtccac

SEQ ID NO: 1557 - DNA, 72 bp, synthetic construct
  misc_feature 1..72: note = Synthetic: 3539_HNF4_FOXA_diMut_GG2TT_n1
  source 1..72: mol_type = other DNA
gttggaggctgctggtaaacattaaccaaggtcaccccagttatcagaggagcaaacaggggcaaagtccac

SEQ ID NO: 1558 - DNA, 72 bp, synthetic construct
  misc_feature 1..72: note = Synthetic: 3540_HNF4_FOXA_diMut_GG3AA_n1
  source 1..72: mol_type = other DNA
ggaagaggctgctggtaaacattaaccaaggtcaccccagttatcagaggagcaaacaggggcaaagtccac

SEQ ID NO: 1559 - DNA, 72 bp, synthetic construct
  misc_feature 1..72: note = Synthetic: 3542_HNF4_FOXA_diMut_GG3AT_n1
  source 1..72: mol_type = other DNA
ggatgaggctgctggtaaacattaaccaaggtcaccccagttatcagaggagcaaacaggggcaaagtccac

SEQ ID NO: 1560 - DNA, 72 bp, synthetic construct
  misc_feature 1..72: note = Synthetic: 3545_HNF4_FOXA_diMut_GG3CT_n1
  source 1..72: mol_type = other DNA
ggctgaggctgctggtaaacattaaccaaggtcaccccagttatcagaggagcaaacaggggcaaagtccac

SEQ ID NO: 1561 - DNA, 72 bp, synthetic construct
  misc_feature 1..72: note = Synthetic: 3546_HNF4_FOXA_diMut_GG3TA_n1
  source 1..72: mol_type = other DNA
ggtagaggctgctggtaaacattaaccaaggtcaccccagttatcagaggagcaaacaggggcaaagtccac

SEQ ID NO: 1562 - DNA, 72 bp, synthetic construct
  misc_feature 1..72: note = Synthetic: 3550_HNF4_FOXA_diMut_GG4AC_n1
  source 1..72: mol_type = other DNA
gggacaggctgctggtaaacattaaccaaggtcaccccagttatcagaggagcaaacaggggcaaagtccac

SEQ ID NO: 1563 - DNA, 72 bp, synthetic construct
  misc_feature 1..72: note = Synthetic: 3552_HNF4_FOXA_diMut_GG4CA_n1
  source 1..72: mol_type = other DNA
gggcaaggctgctggtaaacattaaccaaggtcaccccagttatcagaggagcaaacaggggcaaagtccac

SEQ ID NO: 1564 - DNA, 72 bp, synthetic construct
  misc_feature 1..72: note = Synthetic: 3560_HNF4_FOXA_diMut_GA5AT_n1
  source 1..72: mol_type = other DNA
ggggatggctgctggtaaacattaaccaaggtcaccccagttatcagaggagcaaacaggggcaaagtccac

SEQ ID NO: 1565 - DNA, 72 bp, synthetic construct
  misc_feature 1..72: note = Synthetic: 3561_HNF4_FOXA_diMut_GA5CC_n1
  source 1..72: mol_type = other DNA
ggggccggctgctggtaaacattaaccaaggtcaccccagttatcagaggagcaaacaggggcaaagtccac

SEQ ID NO: 1566 - DNA, 72 bp, synthetic construct
  misc_feature 1..72: note = Synthetic: 3562_HNF4_FOXA_diMut_GA5CG_n1
  source 1..72: mol_type = other DNA
ggggcgggctgctggtaaacattaaccaaggtcaccccagttatcagaggagcaaacaggggcaaagtccac

SEQ ID NO: 1567 - DNA, 72 bp, synthetic construct
  misc_feature 1..72: note = Synthetic: 3568_HNF4_FOXA_diMut_AG6CC_n1
  source 1..72: mol_type = other DNA
gggggccgctgctggtaaacattaaccaaggtcaccccagttatcagaggagcaaacaggggcaaagtccac

SEQ ID NO: 1568 - DNA, 72 bp, synthetic construct
  misc_feature 1..72: note = Synthetic: 3575_HNF4_FOXA_diMut_AG6TT_n1
  source 1..72: mol_type = other DNA
gggggttgctgctggtaaacattaaccaaggtcaccccagttatcagaggagcaaacaggggcaaagtccac

SEQ ID NO: 1569 - DNA, 72 bp, synthetic construct
  misc_feature 1..72: note = Synthetic: 3577_HNF4_FOXA_diMut_GG7AC_n1
  source 1..72: mol_type = other DNA
gggggaacctgctggtaaacattaaccaaggtcaccccagttatcagaggagcaaacaggggcaaagtccac

SEQ ID NO: 1570 - DNA, 72 bp, synthetic construct
  misc_feature 1..72: note = Synthetic: 3584_HNF4_FOXA_diMut_GG7TT_n1
  source 1..72: mol_type = other DNA
gggggattctgctggtaaacattaaccaaggtcaccccagttatcagaggagcaaacaggggcaaagtccac

SEQ ID NO: 1571 - DNA, 72 bp, synthetic construct
  misc_feature 1..72: note = Synthetic: 3585_HNF4_FOXA_diMut_GC8AA_n1
  source 1..72: mol_type = other DNA
gggggagaatgctggtaaacattaaccaaggtcaccccagttatcagaggagcaaacaggggcaaagtccac

SEQ ID NO: 1572 - DNA, 72 bp, synthetic construct
  misc_feature 1..72: note = Synthetic: 3588_HNF4_FOXA_diMut_GC8CA_n1
  source 1..72: mol_type = other DNA
gggggagcatgctggtaaacattaaccaaggtcaccccagttatcagaggagcaaacaggggcaaagtccac

SEQ ID NO: 1573 - DNA, 72 bp, synthetic construct
  misc_feature 1..72: note = Synthetic: 3589_HNF4_FOXA_diMut_GC8CG_n1
  source 1..72: mol_type = other DNA
gggggagcgtgctggtaaacattaaccaaggtcaccccagttatcagaggagcaaacaggggcaaagtccac

SEQ ID NO: 1574 - DNA, 72 bp, synthetic construct
  misc_feature 1..72: note = Synthetic: 3591_HNF4_FOXA_diMut_GC8TA_n1
  source 1..72: mol_type = other DNA
gggggagtatgctggtaaacattaaccaaggtcaccccagttatcagaggagcaaacaggggcaaagtccac

SEQ ID NO: 1575 - DNA, 72 bp, synthetic construct
  misc_feature 1..72: note = Synthetic: 3595_HNF4_FOXA_diMut_CT9AC_n1
  source 1..72: mol_type = other DNA
gggggaggacgctggtaaacattaaccaaggtcaccccagttatcagaggagcaaacaggggcaaagtccac

SEQ ID NO: 1576 - DNA, 72 bp, synthetic construct
  misc_feature 1..72: note = Synthetic: 3598_HNF4_FOXA_diMut_CT9GC_n1
  source 1..72: mol_type = other DNA
gggggagggcgctggtaaacattaaccaaggtcaccccagttatcagaggagcaaacaggggcaaagtccac

SEQ ID NO: 1577 - DNA, 72 bp, synthetic construct
  misc_feature 1..72: note = Synthetic: 3600_HNF4_FOXA_diMut_CT9TA_n1
  source 1..72: mol_type = other DNA
gggggaggtagctggtaaacattaaccaaggtcaccccagttatcagaggagcaaacaggggcaaagtccac

SEQ ID NO: 1578 - DNA, 72 bp, synthetic construct
  misc_feature 1..72: note = Synthetic: 3601_HNF4_FOXA_diMut_CT9TC_n1
  source 1..72: mol_type = other DNA
gggggaggtcgctggtaaacattaaccaaggtcaccccagttatcagaggagcaaacaggggcaaagtccac

SEQ ID NO: 1579 - DNA, 72 bp, synthetic construct
  misc_feature 1..72: note = Synthetic: 3602_HNF4_FOXA_diMut_CT9TG_n1
  source 1..72: mol_type = other DNA
gggggaggtggctggtaaacattaaccaaggtcaccccagttatcagaggagcaaacaggggcaaagtccac

SEQ ID NO: 1580 - DNA, 72 bp, synthetic construct
  misc_feature 1..72: note = Synthetic: 3605_HNF4_FOXA_diMut_TG10AT_n1
  source 1..72: mol_type = other DNA
gggggaggcatctggtaaacattaaccaaggtcaccccagttatcagaggagcaaacaggggcaaagtccac

SEQ ID NO: 1581 - DNA, 72 bp, synthetic construct
  misc_feature 1..72: note = Synthetic: 3608_HNF4_FOXA_diMut_TG10CT_n1
  source 1..72: mol_type = other DNA
gggggaggcctctggtaaacattaaccaaggtcaccccagttatcagaggagcaaacaggggcaaagtccac

SEQ ID NO: 1582 - DNA, 72 bp, synthetic construct
  misc_feature 1..72: note = Synthetic: 3609_HNF4_FOXA_diMut_TG10GA_n1
  source 1..72: mol_type = other DNA
gggggaggcgactggtaaacattaaccaaggtcaccccagttatcagaggagcaaacaggggcaaagtccac

SEQ ID NO: 1583 - DNA, 72 bp, synthetic construct
  misc_feature 1..72: note = Synthetic: 3613_HNF4_FOXA_diMut_GC11AG_n1
  source 1..72: mol_type = other DNA
gggggaggctagtggtaaacattaaccaaggtcaccccagttatcagaggagcaaacaggggcaaagtccac

SEQ ID NO: 1584 - DNA, 72 bp, synthetic construct
  misc_feature 1..72: note = Synthetic: 3615_HNF4_FOXA_diMut_GC11CA_n1
  source 1..72: mol_type = other DNA
gggggaggctcatggtaaacattaaccaaggtcaccccagttatcagaggagcaaacaggggcaaagtccac

SEQ ID NO: 1585 - DNA, 72 bp, synthetic construct
  misc_feature 1..72: note = Synthetic: 3618_HNF4_FOXA_diMut_GC11TA_n1
  source 1..72: mol_type = other DNA
gggggaggcttatggtaaacattaaccaaggtcaccccagttatcagaggagcaaacaggggcaaagtccac

SEQ ID NO: 1586 - DNA, 72 bp, synthetic construct
  misc_feature 1..72: note = Synthetic: 3621_HNF4_FOXA_diMut_CT12AA_n1
  source 1..72: mol_type = other DNA
gggggaggctgaaggtaaacattaaccaaggtcaccccagttatcagaggagcaaacaggggcaaagtccac

SEQ ID NO: 1587 - DNA, 72 bp, synthetic construct
  misc_feature 1..72: note = Synthetic: 3622_HNF4_FOXA_diMut_CT12AC_n1
  source 1..72: mol_type = other DNA
gggggaggctgacggtaaacattaaccaaggtcaccccagttatcagaggagcaaacaggggcaaagtccac

SEQ ID NO: 1588 - DNA, 72 bp, synthetic construct
  misc_feature 1..72: note = Synthetic: 3624_HNF4_FOXA_diMut_CT12GA_n1
  source 1..72: mol_type = other DNA
gggggaggctggaggtaaacattaaccaaggtcaccccagttatcagaggagcaaacaggggcaaagtccac

SEQ ID NO: 1589 - DNA, 72 bp, synthetic construct
  misc_feature 1..72: note = Synthetic: 3625_HNF4_FOXA_diMut_CT12GC_n1
  source 1..72: mol_type = other DNA
gggggaggctggcggtaaacattaaccaaggtcaccccagttatcagaggagcaaacaggggcaaagtccac

SEQ ID NO: 1590 - DNA, 72 bp, synthetic construct
  misc_feature 1..72: note = Synthetic: 3626_HNF4_FOXA_diMut_CT12GG_n1
  source 1..72: mol_type = other DNA
gggggaggctgggggtaaacattaaccaaggtcaccccagttatcagaggagcaaacaggggcaaagtccac

SEQ ID NO: 1591 - DNA, 72 bp, synthetic construct
  misc_feature 1..72: note = Synthetic: 3627_HNF4_FOXA_diMut_CT12TA_n1
  source 1..72: mol_type = other DNA
gggggaggctgtaggtaaacattaaccaaggtcaccccagttatcagaggagcaaacaggggcaaagtccac

SEQ ID NO: 1592 - DNA, 72 bp, synthetic construct
  misc_feature 1..72: note = Synthetic: 3630_HNF4_FOXA_diMut_TG13AA_n1
  source 1..72: mol_type = other DNA
gggggaggctgcaagtaaacattaaccaaggtcaccccagttatcagaggagcaaacaggggcaaagtccac

SEQ ID NO: 1593 - DNA, 72 bp, synthetic construct
  misc_feature 1..72: note = Synthetic: 3631_HNF4_FOXA_diMut_TG13AC_n1
  source 1..72: mol_type = other DNA
gggggaggctgcacgtaaacattaaccaaggtcaccccagttatcagaggagcaaacaggggcaaagtccac

SEQ ID NO: 1594 - DNA, 72 bp, synthetic construct
  misc_feature 1..72: note = Synthetic: 3632_HNF4_FOXA_diMut_TG13AT_n1
  source 1..72: mol_type = other DNA
gggggaggctgcatgtaaacattaaccaaggtcaccccagttatcagaggagcaaacaggggcaaagtccac

SEQ ID NO: 1595 - DNA, 72 bp, synthetic construct
  misc_feature 1..72: note = Synthetic: 3635_HNF4_FOXA_diMut_TG13CT_n1
  source 1..72: mol_type = other DNA
gggggaggctgcctgtaaacattaaccaaggtcaccccagttatcagaggagcaaacaggggcaaagtccac

SEQ ID NO: 1596 - DNA, 72 bp, synthetic construct
  misc_feature 1..72: note = Synthetic: 3637_HNF4_FOXA_diMut_TG13GC_n1
  source 1..72: mol_type = other DNA
gggggaggctgcgcgtaaacattaaccaaggtcaccccagttatcagaggagcaaacaggggcaaagtccac

SEQ ID NO: 1597 - DNA, 72 bp, synthetic construct
  misc_feature 1..72: note = Synthetic: 3638_HNF4_FOXA_diMut_TG13GT_n1
  source 1..72: mol_type = other DNA
gggggaggctgcgtgtaaacattaaccaaggtcaccccagttatcagaggagcaaacaggggcaaagtccac

SEQ ID NO: 1598 - DNA, 72 bp, synthetic construct
  misc_feature 1..72: note = Synthetic: 3649_HNF4_FOXA_diMut_GT15AC_n1
  source 1..72: mol_type = other DNA
gggggaggctgctgacaaacattaaccaaggtcaccccagttatcagaggagcaaacaggggcaaagtccac

SEQ ID NO: 1599 - DNA, 72 bp, synthetic construct
  misc_feature 1..72: note = Synthetic: 3711_HNF4_FOXA_diMut_TT22AA_n1
  source 1..72: mol_type = other DNA
gggggaggctgctggtaaacaaaaaccaaggtcaccccagttatcagaggagcaaacaggggcaaagtccac

SEQ ID NO: 1600 - DNA, 72 bp, synthetic construct
  misc_feature 1..72: note = Synthetic: 3713_HNF4_FOXA_diMut_TT22AG_n1
  source 1..72: mol_type = other DNA
gggggaggctgctggtaaacaagaaccaaggtcaccccagttatcagaggagcaaacaggggcaaagtccac

SEQ ID NO: 1601 - DNA, 72 bp, synthetic construct
  misc_feature 1..72: note = Synthetic: 3726_HNF4_FOXA_diMut_TA23GC_n1
  source 1..72: mol_type = other DNA
gggggaggctgctggtaaacatgcaccaaggtcaccccagttatcagaggagcaaacaggggcaaagtccac

SEQ ID NO: 1602 - DNA, 72 bp, synthetic construct
  misc_feature 1..72: note = Synthetic: 3727_HNF4_FOXA_diMut_TA23GG_n1
  source 1..72: mol_type = other DNA
gggggaggctgctggtaaacatggaccaaggtcaccccagttatcagaggagcaaacaggggcaaagtccac

SEQ ID NO: 1603 - DNA, 72 bp, synthetic construct
  misc_feature 1..72: note = Synthetic: 3729_HNF4_FOXA_diMut_AA24CC_n1
  source 1..72: mol_type = other DNA
gggggaggctgctggtaaacattccccaaggtcaccccagttatcagaggagcaaacaggggcaaagtccac

SEQ ID NO: 1604 - DNA, 72 bp, synthetic construct
  misc_feature 1..72: note = Synthetic: 3730_HNF4_FOXA_diMut_AA24CG_n1
  source 1..72: mol_type = other DNA
gggggaggctgctggtaaacattcgccaaggtcaccccagttatcagaggagcaaacaggggcaaagtccac

SEQ ID NO: 1605 - DNA, 72 bp, synthetic construct
  misc_feature 1..72: note = Synthetic: 3732_HNF4_FOXA_diMut_AA24GC_n1
  source 1..72: mol_type = other DNA
gggggaggctgctggtaaacattgcccaaggtcaccccagttatcagaggagcaaacaggggcaaagtccac

SEQ ID NO: 1606 - DNA, 72 bp, synthetic construct
  misc_feature 1..72: note = Synthetic: 3733_HNF4_FOXA_diMut_AA24GG_n1
  source 1..72: mol_type = other DNA
gggggaggctgctggtaaacattggccaaggtcaccccagttatcagaggagcaaacaggggcaaagtccac

SEQ ID NO: 1607 - DNA, 72 bp, synthetic construct
  misc_feature 1..72: note = Synthetic: 3734_HNF4_FOXA_diMut_AA24GT_n1
  source 1..72: mol_type = other DNA
gggggaggctgctggtaaacattgtccaaggtcaccccagttatcagaggagcaaacaggggcaaagtccac

SEQ ID NO: 1608 - DNA, 72 bp, synthetic construct
  misc_feature 1..72: note = Synthetic: 3735_HNF4_FOXA_diMut_AA24TC_n1
  source 1..72: mol_type = other DNA
gggggaggctgctggtaaacatttcccaaggtcaccccagttatcagaggagcaaacaggggcaaagtccac

SEQ ID NO: 1609 - DNA, 72 bp, synthetic construct
  misc_feature 1..72: note = Synthetic: 3736_HNF4_FOXA_diMut_AA24TG_n1
  source 1..72: mol_type = other DNA
gggggaggctgctggtaaacatttgccaaggtcaccccagttatcagaggagcaaacaggggcaaagtccac

SEQ ID NO: 1610 - DNA, 72 bp, synthetic construct
  misc_feature 1..72: note = Synthetic: 3738_HNF4_FOXA_diMut_AC25CA_n1
  source 1..72: mol_type = other DNA
gggggaggctgctggtaaacattacacaaggtcaccccagttatcagaggagcaaacaggggcaaagtccac

SEQ ID NO: 1611 - DNA, 72 bp, synthetic construct
  misc_feature 1..72: note = Synthetic: 3740_HNF4_FOXA_diMut_AC25CT_n1
  source 1..72: mol_type = other DNA
gggggaggctgctggtaaacattactcaaggtcaccccagttatcagaggagcaaacaggggcaaagtccac

SEQ ID NO: 1612 - DNA, 72 bp, synthetic construct
  misc_feature 1..72: note = Synthetic: 3743_HNF4_FOXA_diMut_AC25GT_n1
  source 1..72: mol_type = other DNA
gggggaggctgctggtaaacattagtcaaggtcaccccagttatcagaggagcaaacaggggcaaagtccac

SEQ ID NO: 1613 - DNA, 72 bp, synthetic construct
  misc_feature 1..72: note = Synthetic: 3763_HNF4_FOXA_diMut_CA27TG_n1
  source 1..72: mol_type = other DNA
gggggaggctgctggtaaacattaactgaggtcaccccagttatcagaggagcaaacaggggcaaagtccac

SEQ ID NO: 1614 - DNA, 72 bp, synthetic construct
  misc_feature 1..72: note = Synthetic: 3814_HNF4_FOXA_diMut_CA33GG_n1
  source 1..72: mol_type = other DNA
gggggaggctgctggtaaacattaaccaaggtggccccagttatcagaggagcaaacaggggcaaagtccac

SEQ ID NO: 1615 - DNA, 72 bp, synthetic construct
  misc_feature 1..72: note = Synthetic: 3823_HNF4_FOXA_diMut_AC34GG_n1
  source 1..72: mol_type = other DNA
gggggaggctgctggtaaacattaaccaaggtcggcccagttatcagaggagcaaacaggggcaaagtccac

SEQ ID NO: 1616 - DNA, 72 bp, synthetic construct
  misc_feature 1..72: note = Synthetic: 3828_HNF4_FOXA_diMut_CC35AA_n1
  source 1..72: mol_type = other DNA
gggggaggctgctggtaaacattaaccaaggtcaaaccagttatcagaggagcaaacaggggcaaagtccac

SEQ ID NO: 1617 - DNA, 72 bp, synthetic construct
  misc_feature 1..72: note = Synthetic: 3830_HNF4_FOXA_diMut_CC35AT_n1
  source 1..72: mol_type = other DNA
gggggaggctgctggtaaacattaaccaaggtcaatccagttatcagaggagcaaacaggggcaaagtccac

SEQ ID NO: 1618 - DNA, 72 bp, synthetic construct
  misc_feature 1..72: note = Synthetic: 3831_HNF4_FOXA_diMut_CC35GA_n1
  source 1..72: mol_type = other DNA
gggggaggctgctggtaaacattaaccaaggtcagaccagttatcagaggagcaaacaggggcaaagtccac

SEQ ID NO: 1619 - DNA, 72 bp, synthetic construct
  misc_feature 1..72: note = Synthetic: 3833_HNF4_FOXA_diMut_CC35GT_n1
  source 1..72: mol_type = other DNA
gggggaggctgctggtaaacattaaccaaggtcagtccagttatcagaggagcaaacaggggcaaagtccac

SEQ ID NO: 1620 - DNA, 72 bp, synthetic construct
  misc_feature 1..72: note = Synthetic: 3834_HNF4_FOXA_diMut_CC35TA_n1
  source 1..72: mol_type = other DNA
gggggaggctgctggtaaacattaaccaaggtcataccagttatcagaggagcaaacaggggcaaagtccac

SEQ ID NO: 1621 - DNA, 72 bp, synthetic construct
  misc_feature 1..72: note = Synthetic: 3836_HNF4_FOXA_diMut_CC35TT_n1
  source 1..72: mol_type = other DNA
gggggaggctgctggtaaacattaaccaaggtcattccagttatcagaggagcaaacaggggcaaagtccac

SEQ ID NO: 1622 - DNA, 72 bp, synthetic construct
  misc_feature 1..72: note = Synthetic: 3838_HNF4_FOXA_diMut_CC36AG_n1
  source 1..72: mol_type = other DNA
gggggaggctgctggtaaacattaaccaaggtcacagcagttatcagaggagcaaacaggggcaaagtccac

SEQ ID NO: 1623 - DNA, 72 bp, synthetic construct
  misc_feature 1..72: note = Synthetic: 3842_HNF4_FOXA_diMut_CC36GT_n1
  source 1..72: mol_type = other DNA
gggggaggctgctggtaaacattaaccaaggtcacgtcagttatcagaggagcaaacaggggcaaagtccac

SEQ ID NO: 1624 - DNA, 72 bp, synthetic construct
  misc_feature 1..72: note = Synthetic: 3845_HNF4_FOXA_diMut_CC36TT_n1
  source 1..72: mol_type = other DNA
gggggaggctgctggtaaacattaaccaaggtcacttcagttatcagaggagcaaacaggggcaaagtccac

SEQ ID NO: 1625 - DNA, 72 bp, synthetic construct
  misc_feature 1..72: note = Synthetic: 3846_HNF4_FOXA_diMut_CC37AA_n1
  source 1..72: mol_type = other DNA
gggggaggctgctggtaaacattaaccaaggtcaccaaagttatcagaggagcaaacaggggcaaagtccac

SEQ ID NO: 1626 - DNA, 72 bp, synthetic construct
  misc_feature 1..72: note = Synthetic: 3847_HNF4_FOXA_diMut_CC37AG_n1
  source 1..72: mol_type = other DNA
gggggaggctgctggtaaacattaaccaaggtcaccagagttatcagaggagcaaacaggggcaaagtccac

SEQ ID NO: 1627 - DNA, 72 bp, synthetic construct
  misc_feature 1..72: note = Synthetic: 3849_HNF4_FOXA_diMut_CC37GA_n1
  source 1..72: mol_type = other DNA
gggggaggctgctggtaaacattaaccaaggtcaccgaagttatcagaggagcaaacaggggcaaagtccac

SEQ ID NO: 1628 - DNA, 72 bp, synthetic construct
  misc_feature 1..72: note = Synthetic: 3850_HNF4_FOXA_diMut_CC37GG_n1
  source 1..72: mol_type = other DNA
gggggaggctgctggtaaacattaaccaaggtcaccggagttatcagaggagcaaacaggggcaaagtccac

SEQ ID NO: 1629 - DNA, 72 bp, synthetic construct
  misc_feature 1..72: note = Synthetic: 3852_HNF4_FOXA_diMut_CC37TA_n1
  source 1..72: mol_type = other DNA
gggggaggctgctggtaaacattaaccaaggtcacctaagttatcagaggagcaaacaggggcaaagtccac

SEQ ID NO: 1630 - DNA, 72 bp, synthetic construct
  misc_feature 1..72: note = Synthetic: 3853_HNF4_FOXA_diMut_CC37TG_n1
  source 1..72: mol_type = other DNA
gggggaggctgctggtaaacattaaccaaggtcacctgagttatcagaggagcaaacaggggcaaagtccac

SEQ ID NO: 1631 - DNA, 72 bp, synthetic construct
  misc_feature 1..72: note = Synthetic: 3855_HNF4_FOXA_diMut_CA38AC_n1
  source 1..72: mol_type = other DNA
gggggaggctgctggtaaacattaaccaaggtcacccacgttatcagaggagcaaacaggggcaaagtccac

SEQ ID NO: 1632 - DNA, 72 bp, synthetic construct
  misc_feature 1..72: note = Synthetic: 3856_HNF4_FOXA_diMut_CA38AG_n1
  source 1..72: mol_type = other DNA
gggggaggctgctggtaaacattaaccaaggtcacccaggttatcagaggagcaaacaggggcaaagtccac

SEQ ID NO: 1633 - DNA, 72 bp, synthetic construct
  misc_feature 1..72: note = Synthetic: 3857_HNF4_FOXA_diMut_CA38AT_n1
  source 1..72: mol_type = other DNA
gggggaggctgctggtaaacattaaccaaggtcacccatgttatcagaggagcaaacaggggcaaagtccac

SEQ ID NO: 1634 - DNA, 72 bp, synthetic construct
  misc_feature 1..72: note = Synthetic: 3858_HNF4_FOXA_diMut_CA38GC_n1
  source 1..72: mol_type = other DNA
gggggaggctgctggtaaacattaaccaaggtcacccgcgttatcagaggagcaaacaggggcaaagtccac

SEQ ID NO: 1635 - DNA, 72 bp, synthetic construct
  misc_feature 1..72: note = Synthetic: 3860_HNF4_FOXA_diMut_CA38GT_n1
  source 1..72: mol_type = other DNA
gggggaggctgctggtaaacattaaccaaggtcacccgtgttatcagaggagcaaacaggggcaaagtccac

SEQ ID NO: 1636 - DNA, 72 bp, synthetic construct
  misc_feature 1..72: note = Synthetic: 3864_HNF4_FOXA_diMut_AG39CA_n1
  source 1..72: mol_type = other DNA
gggggaggctgctggtaaacattaaccaaggtcacccccattatcagaggagcaaacaggggcaaagtccac

SEQ ID NO: 1637 - DNA, 72 bp, synthetic construct
  misc_feature 1..72: note = Synthetic: 3868_HNF4_FOXA_diMut_AG39GC_n1
  source 1..72: mol_type = other DNA
gggggaggctgctggtaaacattaaccaaggtcaccccgcttatcagaggagcaaacaggggcaaagtccac

SEQ ID NO: 1638 - DNA, 72 bp, synthetic construct
  misc_feature 1..72: note = Synthetic: 3870_HNF4_FOXA_diMut_AG39TA_n1
  source 1..72: mol_type = other DNA
gggggaggctgctggtaaacattaaccaaggtcacccctattatcagaggagcaaacaggggcaaagtccac

SEQ ID NO: 1639 - DNA, 72 bp, synthetic construct
  misc_feature 1..72: note = Synthetic: 3871_HNF4_FOXA_diMut_AG39TC_n1
  source 1..72: mol_type = other DNA
gggggaggctgctggtaaacattaaccaaggtcacccctcttatcagaggagcaaacaggggcaaagtccac

SEQ ID NO: 1640 - DNA, 72 bp, synthetic construct
  misc_feature 1..72: note = Synthetic: 3872_HNF4_FOXA_diMut_AG39TT_n1
  source 1..72: mol_type = other DNA
gggggaggctgctggtaaacattaaccaaggtcaccccttttatcagaggagcaaacaggggcaaagtccac

SEQ ID NO: 1641 - DNA, 72 bp, synthetic construct
  misc_feature 1..72: note = Synthetic: 3880_HNF4_FOXA_diMut_GT40TC_n1
  source 1..72: mol_type = other DNA
gggggaggctgctggtaaacattaaccaaggtcaccccatctatcagaggagcaaacaggggcaaagtccac

SEQ ID NO: 1642 - DNA, 72 bp, synthetic construct
  misc_feature 1..72: note = Synthetic: 3881_HNF4_FOXA_diMut_GT40TG_n1
  source 1..72: mol_type = other DNA
gggggaggctgctggtaaacattaaccaaggtcaccccatgtatcagaggagcaaacaggggcaaagtccac

SEQ ID NO: 1643 - DNA, 72 bp, synthetic construct
  misc_feature 1..72: note = Synthetic: 3883_HNF4_FOXA_diMut_TT41AC_n1
  source 1..72: mol_type = other DNA
gggggaggctgctggtaaacattaaccaaggtcaccccagacatcagaggagcaaacaggggcaaagtccac

SEQ ID NO: 1644 - DNA, 72 bp, synthetic construct
  misc_feature 1..72: note = Synthetic: 3884_HNF4_FOXA_diMut_TT41AG_n1
  source 1..72: mol_type = other DNA
gggggaggctgctggtaaacattaaccaaggtcaccccagagatcagaggagcaaacaggggcaaagtccac

SEQ ID NO: 1645 - DNA, 72 bp, synthetic construct
  misc_feature 1..72: note = Synthetic: 3887_HNF4_FOXA_diMut_TT41CG_n1
  source 1..72: mol_type = other DNA
gggggaggctgctggtaaacattaaccaaggtcaccccagcgatcagaggagcaaacaggggcaaagtccac

SEQ ID NO: 1646 - DNA, 72 bp, synthetic construct
  misc_feature 1..72: note = Synthetic: 3889_HNF4_FOXA_diMut_TT41GC_n1
  source 1..72: mol_type = other DNA
gggggaggctgctggtaaacattaaccaaggtcaccccaggcatcagaggagcaaacaggggcaaagtccac

SEQ ID NO: 1647 - DNA, 72 bp, synthetic construct
  misc_feature 1..72: note = Synthetic: 3890_HNF4_FOXA_diMut_TT41GG_n1
  source 1..72: mol_type = other DNA
gggggaggctgctggtaaacattaaccaaggtcaccccagggatcagaggagcaaacaggggcaaagtccac

SEQ ID NO: 1648 - DNA, 72 bp, synthetic construct
  misc_feature 1..72: note = Synthetic: 3897_HNF4_FOXA_diMut_TA42GC_n1
  source 1..72: mol_type = other DNA
gggggaggctgctggtaaacattaaccaaggtcaccccagtgctcagaggagcaaacaggggcaaagtccac

SEQ ID NO: 1649 - DNA, 72 bp, synthetic construct
  misc_feature 1..72: note = Synthetic: 3904_HNF4_FOXA_diMut_AT43GC_n1
  source 1..72: mol_type = other DNA
gggggaggctgctggtaaacattaaccaaggtcaccccagttgccagaggagcaaacaggggcaaagtccac

SEQ ID NO: 1650 - DNA, 72 bp, synthetic construct
  misc_feature 1..72: note = Synthetic: 3910_HNF4_FOXA_diMut_TC44AG_n1
  source 1..72: mol_type = other DNA
gggggaggctgctggtaaacattaaccaaggtcaccccagttaagagaggagcaaacaggggcaaagtccac

SEQ ID NO: 1651 - DNA, 72 bp, synthetic construct
  misc_feature 1..72: note = Synthetic: 3913_HNF4_FOXA_diMut_TC44CG_n1
  source 1..72: mol_type = other DNA
gggggaggctgctggtaaacattaaccaaggtcaccccagttacgagaggagcaaacaggggcaaagtccac

SEQ ID NO: 1652 - DNA, 72 bp, synthetic construct
  misc_feature 1..72: note = Synthetic: 3917_HNF4_FOXA_diMut_TC44GT_n1
  source 1..72: mol_type = other DNA
gggggaggctgctggtaaacattaaccaaggtcaccccagttagtagaggagcaaacaggggcaaagtccac

SEQ ID NO: 1653 - DNA, 72 bp, synthetic construct
  misc_feature 1..72: note = Synthetic: 3934_HNF4_FOXA_diMut_AG46TC_n1
  source 1..72: mol_type = other DNA
gggggaggctgctggtaaacattaaccaaggtcaccccagttatctcaggagcaaacaggggcaaagtccac

SEQ ID NO: 1654 - DNA, 72 bp, synthetic construct
  misc_feature 1..72: note = Synthetic: 3936_HNF4_FOXA_diMut_GA47AC_n1
  source 1..72: mol_type = other DNA
gggggaggctgctggtaaacattaaccaaggtcaccccagttatcaacggagcaaacaggggcaaagtccac

SEQ ID NO: 1655 - DNA, 72 bp, synthetic construct
  misc_feature 1..72: note = Synthetic: 3938_HNF4_FOXA_diMut_GA47AT_n1
  source 1..72: mol_type = other DNA
gggggaggctgctggtaaacattaaccaaggtcaccccagttatcaatggagcaaacaggggcaaagtccac

SEQ ID NO: 1656 - DNA, 72 bp, synthetic construct
  misc_feature 1..72: note = Synthetic: 3940_HNF4_FOXA_diMut_GA47CG_n1
  source 1..72: mol_type = other DNA
gggggaggctgctggtaaacattaaccaaggtcaccccagttatcacgggagcaaacaggggcaaagtccac

SEQ ID NO: 1657 - DNA, 72 bp, synthetic construct
  misc_feature 1..72: note = Synthetic: 3941_HNF4_FOXA_diMut_GA47CT_n1
  source 1..72: mol_type = other DNA
gggggaggctgctggtaaacattaaccaaggtcaccccagttatcactggagcaaacaggggcaaagtccac

SEQ ID NO: 1658 - DNA, 72 bp, synthetic construct
  misc_feature 1..72: note = Synthetic: 3945_HNF4_FOXA_diMut_AG48CA_n1
  source 1..72: mol_type = other DNA
gggggaggctgctggtaaacattaaccaaggtcaccccagttatcagcagagcaaacaggggcaaagtccac

SEQ ID NO: 1659 - DNA, 72 bp, synthetic construct
  misc_feature 1..72: note = Synthetic: 3947_HNF4_FOXA_diMut_AG48CT_n1
  source 1..72: mol_type = other DNA
gggggaggctgctggtaaacattaaccaaggtcaccccagttatcagctgagcaaacaggggcaaagtccac

SEQ ID NO: 1660 - DNA, 72 bp, synthetic construct
  misc_feature 1..72: note = Synthetic: 3948_HNF4_FOXA_diMut_AG48GA_n1
  source 1..72: mol_type = other DNA
gggggaggctgctggtaaacattaaccaaggtcaccccagttatcaggagagcaaacaggggcaaagtccac

SEQ ID NO: 1661 - DNA, 72 bp, synthetic construct
  misc_feature 1..72: note = Synthetic: 3949_HNF4_FOXA_diMut_AG48GC_n1
  source 1..72: mol_type = other DNA
gggggaggctgctggtaaacattaaccaaggtcaccccagttatcaggcgagcaaacaggggcaaagtccac

SEQ ID NO: 1662 - DNA, 72 bp, synthetic construct
  misc_feature 1..72: note = Synthetic: 3950_HNF4_FOXA_diMut_AG48GT_n1
  source 1..72: mol_type = other DNA
gggggaggctgctggtaaacattaaccaaggtcaccccagttatcaggtgagcaaacaggggcaaagtccac

SEQ ID NO: 1663 - DNA, 72 bp, synthetic construct
  misc_feature 1..72: note = Synthetic: 3951_HNF4_FOXA_diMut_AG48TA_n1
  source 1..72: mol_type = other DNA
gggggaggctgctggtaaacattaaccaaggtcaccccagttatcagtagagcaaacaggggcaaagtccac

SEQ ID NO: 1664 - DNA, 72 bp, synthetic construct
  misc_feature 1..72: note = Synthetic: 3952_HNF4_FOXA_diMut_AG48TC_n1
  source 1..72: mol_type = other DNA
gggggaggctgctggtaaacattaaccaaggtcaccccagttatcagtcgagcaaacaggggcaaagtccac

SEQ ID NO: 1665 - DNA, 72 bp, synthetic construct
  misc_feature 1..72: note = Synthetic: 3953_HNF4_FOXA_diMut_AG48TT_n1
  source 1..72: mol_type = other DNA
gggggaggctgctggtaaacattaaccaaggtcaccccagttatcagttgagcaaacaggggcaaagtccac

SEQ ID NO: 1666 - DNA, 72 bp, synthetic construct
  misc_feature 1..72: note = Synthetic: 3954_HNF4_FOXA_diMut_GG49AA_n1
  source 1..72: mol_type = other DNA
gggggaggctgctggtaaacattaaccaaggtcaccccagttatcagaaaagcaaacaggggcaaagtccac

SEQ ID NO: 1667 - DNA, 72 bp, synthetic construct
  misc_feature 1..72: note = Synthetic: 3955_HNF4_FOXA_diMut_GG49AC_n1
  source 1..72: mol_type = other DNA
gggggaggctgctggtaaacattaaccaaggtcaccccagttatcagaacagcaaacaggggcaaagtccac

SEQ ID NO: 1668 - DNA, 72 bp, synthetic construct
  misc_feature 1..72: note = Synthetic: 3956_HNF4_FOXA_diMut_GG49AT_n1
  source 1..72: mol_type = other DNA
gggggaggctgctggtaaacattaaccaaggtcaccccagttatcagaatagcaaacaggggcaaagtccac

SEQ ID NO: 1669 - DNA, 72 bp, synthetic construct
  misc_feature 1..72: note = Synthetic: 3957_HNF4_FOXA_diMut_GG49CA_n1
  source 1..72: mol_type = other DNA
gggggaggctgctggtaaacattaaccaaggtcaccccagttatcagacaagcaaacaggggcaaagtccac

SEQ ID NO: 1670 - DNA, 72 bp, synthetic construct
  misc_feature 1..72: note = Synthetic: 3959_HNF4_FOXA_diMut_GG49CT_n1
  source 1..72: mol_type = other DNA
gggggaggctgctggtaaacattaaccaaggtcaccccagttatcagactagcaaacaggggcaaagtccac

SEQ ID NO: 1671 - DNA, 72 bp, synthetic construct
  misc_feature 1..72: note = Synthetic: 3960_HNF4_FOXA_diMut_GG49TA_n1
  source 1..72: mol_type = other DNA
gggggaggctgctggtaaacattaaccaaggtcaccccagttatcagataagcaaacaggggcaaagtccac

SEQ ID NO: 1672 - DNA, 72 bp, synthetic construct
  misc_feature 1..72: note = Synthetic: 3967_HNF4_FOXA_diMut_GA50CG_n1
  source 1..72: mol_type = other DNA
gggggaggctgctggtaaacattaaccaaggtcaccccagttatcagagcggcaaacaggggcaaagtccac

SEQ ID NO: 1673 - DNA, 72 bp, synthetic construct
  misc_feature 1..72: note = Synthetic: 3968_HNF4_FOXA_diMut_GA50CT_n1
  source 1..72: mol_type = other DNA
gggggaggctgctggtaaacattaaccaaggtcaccccagttatcagagctgcaaacaggggcaaagtccac

SEQ ID NO: 1674 - DNA, 72 bp, synthetic construct
  misc_feature 1..72: note = Synthetic: 3969_HNF4_FOXA_diMut_GA50TC_n1
  source 1..72: mol_type = other DNA
gggggaggctgctggtaaacattaaccaaggtcaccccagttatcagagtcgcaaacaggggcaaagtccac

SEQ ID NO: 1675 - DNA, 72 bp, synthetic construct
  misc_feature 1..72: note = Synthetic: 3972_HNF4_FOXA_diMut_AG51CA_n1
  source 1..72: mol_type = other DNA
gggggaggctgctggtaaacattaaccaaggtcaccccagttatcagaggcacaaacaggggcaaagtccac

SEQ ID NO: 1676 - DNA, 72 bp, synthetic construct
  misc_feature 1..72: note = Synthetic: 3973_HNF4_FOXA_diMut_AG51CC_n1
  source 1..72: mol_type = other DNA
gggggaggctgctggtaaacattaaccaaggtcaccccagttatcagaggcccaaacaggggcaaagtccac

SEQ ID NO: 1677 - DNA, 72 bp, synthetic construct
  misc_feature 1..72: note = Synthetic: 3975_HNF4_FOXA_diMut_AG51GA_n1
  source 1..72: mol_type = other DNA
gggggaggctgctggtaaacattaaccaaggtcaccccagttatcagagggacaaacaggggcaaagtccac

SEQ ID NO: 1678 - DNA, 72 bp, synthetic construct
  misc_feature 1..72: note = Synthetic: 3979_HNF4_FOXA_diMut_AG51TC_n1
  source 1..72: mol_type = other DNA
gggggaggctgctggtaaacattaaccaaggtcaccccagttatcagaggtccaaacaggggcaaagtccac

SEQ ID NO: 1679 - DNA, 72 bp, synthetic construct
  misc_feature 1..72: note = Synthetic: 3982_HNF4_FOXA_diMut_GC52AG_n1
  source 1..72: mol_type = other DNA
gggggaggctgctggtaaacattaaccaaggtcaccccagttatcagaggaagaaacaggggcaaagtccac

SEQ ID NO: 1680 - DNA, 72 bp, synthetic construct
  misc_feature 1..72: note = Synthetic: 3989_HNF4_FOXA_diMut_GC52TT_n1
  source 1..72: mol_type = other DNA
gggggaggctgctggtaaacattaaccaaggtcaccccagttatcagaggattaaacaggggcaaagtccac

SEQ ID NO: 1681 - DNA, 72 bp, synthetic construct
  misc_feature 1..72: note = Synthetic: 4000_HNF4_FOXA_diMut_AA54CG_n1
  source 1..72: mol_type = other DNA
gggggaggctgctggtaaacattaaccaaggtcaccccagttatcagaggagccgacaggggcaaagtccac

SEQ ID NO: 1682 - DNA, 72 bp, synthetic construct
  misc_feature 1..72: note = Synthetic: 4007_HNF4_FOXA_diMut_AA54TT_n1
  source 1..72: mol_type = other DNA
gggggaggctgctggtaaacattaaccaaggtcaccccagttatcagaggagcttacaggggcaaagtccac

SEQ ID NO: 1683 - DNA, 72 bp, synthetic construct
  misc_feature 1..72: note = Synthetic: 4012_HNF4_FOXA_diMut_AA55GG_n1
  source 1..72: mol_type = other DNA
gggggaggctgctggtaaacattaaccaaggtcaccccagttatcagaggagcaggcaggggcaaagtccac

SEQ ID NO: 1684 - DNA, 72 bp, synthetic construct
  misc_feature 1..72: note = Synthetic: 4033_HNF4_FOXA_diMut_CA57TG_n1
  source 1..72: mol_type = other DNA
gggggaggctgctggtaaacattaaccaaggtcaccccagttatcagaggagcaaatgggggcaaagtccac

SEQ ID NO: 1685 - DNA, 72 bp, synthetic construct
  misc_feature 1..72: note = Synthetic: 4038_HNF4_FOXA_diMut_AG58GA_n1
  source 1..72: mol_type = other DNA
gggggaggctgctggtaaacattaaccaaggtcaccccagttatcagaggagcaaacgagggcaaagtccac

SEQ ID NO: 1686 - DNA, 72 bp, synthetic construct
  misc_feature 1..72: note = Synthetic: 4068_HNF4_FOXA_diMut_GG61TA_n1
  source 1..72: mol_type = other DNA
gggggaggctgctggtaaacattaaccaaggtcaccccagttatcagaggagcaaacaggtacaaagtccac

SEQ ID NO: 1687 - DNA, 72 bp, synthetic construct
  misc_feature 1..72: note = Synthetic: 4069_HNF4_FOXA_diMut_GG61TC_n1
  source 1..72: mol_type = other DNA
gggggaggctgctggtaaacattaaccaaggtcaccccagttatcagaggagcaaacaggtccaaagtccac

SEQ ID NO: 1688 - DNA, 72 bp, synthetic construct
  misc_feature 1..72: note = Synthetic: 4070_HNF4_FOXA_diMut_GG61TT_n1
  source 1..72: mol_type = other DNA
gggggaggctgctggtaaacattaaccaaggtcaccccagttatcagaggagcaaacaggttcaaagtccac

SEQ ID NO: 1689 - DNA, 72 bp, synthetic construct
  misc_feature 1..72: note = Synthetic: 4155_HNF4_FOXA_diMut_AC71GA_n1
  source 1..72: mol_type = other DNA
gggggaggctgctggtaaacattaaccaaggtcaccccagttatcagaggagcaaacaggggcaaagtccga

SEQ ID NO: 1690 - skipped

SEQ ID NO: 1691 - DNA, 10828 bp, synthetic construct
  misc_feature 1..10828: note = Synthetic: reverse complement of SEQ ID NO: 146
  source 1..10828: mol_type = other DNA
ttctctgtcacagaatgaaaatttttctgtcatctcttcgttattaatgtttgtaattgactgaatatcaacgcttatttgcagcctgaatggcgaatgggacgcgccctgtagcggcgcattaagcgcggcgggtgtggtggttacgcgcagcgtgaccgctacacttgccagcgccctagcgcccgctcctttcgctttcttcccttcctttctcgccacgttcgccggctttccccgtcaagctctaaatcgggggctccctttagggttccgatttagtgctttacggcacctcgaccccaaaaaacttgattagggtgatggttcacgtagtgggccatcgccctgatagacggtttttcgccctttgacgttggagtccacgttctttaatagtggactcttgttccaaactggaacaacactcaaccctatctcggtctattcttttgatttataagggattttgccgatttcggcctattggttaaaaaatgagctgatttaacaaaaatttaacgcgaattttaacaaaatattaacgtttacaatttcaggtggcacttttcggggaaatgtgcgcggaacccctatttgtttatttttctaaatacattcaaatatgtatccgctcatgagacaataaccctgataaatgcttcaataatattgaaaaaggaagagtatgagtattcaacatttccgtgtcgcccttattcccttttttgcggcattttgccttcctgtttttgctcacccagaaacgctggtgaaagtaaaagatgctgaagatcagttgggtgcacgagtgggttacatcgaactggatctcaacagcggtaagatccttgagagttttcgccccgaagaacgttttccaatgatgagcacttttaaagttctgctatgtggcgcggtattatcccgtattgacgccgggcaagagcaactcggtcgccgcatacactattctcagaatgacttggttgagtactcaccagtcacagaaaagcatcttacggatggcatgacagtaagagaattatgcagtgctgccataaccatgagtgataacactgcggccaacttacttctgacaacgatcggaggaccgaaggagctaaccgcttttttgcacaacatgggggatcatgtaactcgccttgatcgttgggaaccggagctgaatgaagccataccaaacgacgagcgtgacaccacgatgcctgtagcaatggcaacaacgttgcgcaaactattaactggcgaactacttactctagcttcccggcaacaattaatagactggatggaggcggataaagttgcaggaccacttctgcgctcggcccttccggctggctggtttattgctgataaatctggagccggtgagcgtgggtctcgcggtatcattgcagcactggggccagatggtaagccctcccgtatcgtagttatctacacgacggggagtcaggcaactatggatgaacgaaatagacagatcgctgagataggtgcctcactgattaagcattggtaactgtcagaccaagtttactcatatatactttagattgatttaaaacttcatttttaatttaaaaggatctaggtgaagatcctttttgataatctcatgaccaaaatcccttaacgtgagttttcgttccactgagcgtcagaccccgtagaaaagatcaaaggatcttcttgagatcctttttttctgcgcgtaatctgctgcttgcaaacaaaaaaaccaccgctaccagcggtggtttgtttgccggatcaagagctaccaactctttttccgaaggtaactggcttcagcagagcgcagataccaaatactgtccttctagtgtagccgtagttaggccaccacttcaagaactctgtagcaccgcctacatacctcgctctgctaatcctgttaccagtggctgctgccagtggcgataagtcgtgtcttaccgggttggactcaagacgatagttaccggataaggcgcagcggtcgggctgaacggggggttcgtgcacacagcccagcttggagcgaacgacctacaccgaactgagatacctacagcgtgagcattgagaaagcgccacgcttcccgaagggagaaaggcggacaggtatccggtaagcggcagggtcggaacaggagagcgcacgagggagcttccagggggaaacgcctggtatctttatagtcctgtcgggtttcgccacctctgacttgagcgtcgatttttgtgatgctcgtcaggggggcggagcctatggaaaaacgccagcaacgcggcctttttacggttcctggccttttgctggccttttgctcacatgttctttcctgcgttatcccctgattctgtggataaccgtattaccgcctttgagtgagctgataccgctcgccgcagccgaacgaccgagcgcagcgagtcagtgagcgaggaagcggaagagcgcctgatgcggtattttctccttacgcatctgtgcggtatttcacaccgcagaccagccgcgtaacctggcaaaatcggttacggttgagtaataaatggatgccctgcgtaagcgggtgtgggcggacaataaagtcttaaactgaacaaaatagatctaaactatgacaataaagtcttaaactagacagaatagttgtaaactgaaatcagtccagttatgctgtgaaaaagcatactggacttttgttatggctaaagcaaactcttcattttctgaagtgcaaattgcccgtcgtattaaagaggggcgtggccaagggcatggtaaagactatattcgcggcgttgtgacaatttaccgaacaactccgcggccgggaagccgatctcggcttgaacgaattgttaggtggcggtacttgggtcgatatcaaagtgcatcacttcttcccgtatgcccaactttgtatagagagccactgcgggatcgtcaccgtaatctgcttgcacgtagatcacataagcaccaagcgcgttggcctcatgcttgaggagattgatgagcgcggtggcaatgccctgcctccggtgctcgccggagactgcgagatcatagatatagatctcactacgcggctgctcaaacctgggcagaacgtaagccgcgagagcgccaacaaccgcttcttggtcgaaggcagcaagcgcgatgaatgtcttactacggagcaagttcccgaggtaatcggagtccggctgatgttgggagtaggtggctacgtctccgaactcacgaccgaaaagatcaagagcagcccgcatggatttgacttggtcagggccgagcctacatgtgcgaatgatgcccatacttgagccacctaactttgttttagggcgactgccctgctgcgtaacatcgttgctgctgcgtaacatcgttgctgctccataacatcaaacatcgacccacggcgtaacgcgcttgctgcttggatgcccgaggcatagactgtacaaaaaaacagtcataacaagccatgaaaaccgccactgcgccgttaccaccgctgcgttcggtcaaggttctggaccagttgcgtgagcgcatacgctacttgcattacagtttacgaaccgaacaggcttatgtcaactgggttcgtgccttcatccgtttccacggtgtgcgtcacccggcaaccttgggcagcagcgaagtcgaggcatttctgtcctggctggcgaacgagcgcaaggtttcggtctccacgcatcgtcaggcattggcggccttgctgttcttctacggcaaggtgctgtgcacggatctgccctggcttcaggagatcggtagacctcggccgtcgcggcgcttgccggtggtgctgaccccggatgaagtggttcgcatcctcggttttctggaaggcgagcatcgtttgttcgcccaggactctagctatagttctagtggttggcctacgtacccgtagtggctatggcagggcttgccgccccgacgttggctgcgagccctgggccttcacccgaacttgggggttggggtggggaaaaggaagaaacgcgggcgtattggtcccaatggggtctcggtggggtatcgacagagtgccagccctgggaccgaaccccgcgtttatgaacaaacgacccaacacccgtgcgttttattctgtctttttattgccgtcatagcgcgggttccttccggtattgtctccttccgtgtttcagttagcctcccccatctcccggtaccgcatgctatgcatcagctgctagcaccatggctcgaggcgcgcccctgcaggcagctgcgcgctcgctcgctcactgaggccgcccgggcgtcgggcgacctttggtcgcccggcctcagtgagcgagcgagcgcgcagagagggagtggccaactccatcactaggggttcctcctgcaggtgtagttaatgattaacccgccatgctacttatctacgtagccatgctctagagccatagagcccaccgcatccccagcatgcctgctattgtcttcccaatcctcccccttgctgtcctgccccaccccaccccccagaatagaatgacacctactcagacaatgcgatgcaatttcctcattttattaggaaaggacagtgggagtggcaccttccagggtcaaggaaggcacgggggaggggcaaacaacagatggctggcaactagaaggcacagacaacaccacggaattatcagtgcccagcaacctagcccctgtccagcagcgggcaaggcaggcggcgatgagttctgccgtggcgatcgggagggggaaagcgaaagtcccagaaaggagttgacaggtggtggcaatgccccagccagtgggggttgcgtcagcaaacacagagcacaccacgccacgttgacggacaacgggccacaactcctctaaaagagacagcaaccaggatttatacaaggaggagaaaacgaaagccgtacgggaagcaatagctagatacagaggctataaagcagcatatccacacagcgtaaaaggagcaacatagttaagaatatcagtcaatctttcacaaattttgtaatccagaggttgattaacaggaacagagcgtaaataacgggaaagtttcttaacatgtttgtcttgtggcaatacacctgaactagtaattacatatccctaaaaatgtaaatgattgccccaccattttgttttattaacatttaaatgtatacccaaatcaagaaaaacagaacaaatatgggaataaatggcggtaagatgctcttaattaatcagtacaggtcctgggcctcacagcccagcacctccatcctcagggcaatctggtgcacccagctctgggggtgaatcctcaggtatctggtcagcaggggggggtccaggctgttcaccacaggggtgaagctgtcctggttgccctggaacaccttcaccttgccattctggaagaacagggtccactggtggccatcctggctgctgctgatcaggaactccttcacatacatgctggtcagcaggctcttcaccccctgggtggtcaccccagtcaccttcatggtcttctggaagtccacctgcagccactccttggggttgttgacctggggcctccaggcattgctcctgccctgcaggtgcagcctggccttgctggggctccaggtggcaaacatgttggtgaagtagctgctggcagtgatctgggcatcagagatggccttgctctccatgcccaggggcatgctgcagctgttcaggtcacagcccatcagctccatcctcagggtgctcctgatgctgtagtgggtggggtgcagcctgatgtatctggcaatgatgggggggttgaagatgttgtgcttgatgccagagctgtccacattgccaaagaacaccatcagggtgccagtgctgttgcccctgtaggtctgccacttcttgccatccaggctgtacatgatgatgaactggctgatgtacaggctgctgaacttctgcctggccccctgggtcttgatgccatggatgatcatgggggccagcaggtccaccttgatccagctgaagggctccttggtgctccaggcattgatgctgccagagtagtgcagcctggccagcttgggggcccactggccatactggccagaggcagtgatctggaagtccctgatgtggccagaggccatgcccaggggggtctggcacttgttgctgtacaccaggaacagggtgctcatgccagcatgcaggtgctccccaatcaggcactccaccctccagatgccagccttgctgggcagcatctccacagtctcaaacaccccagggtacaggttgtacagggccatcttgtactcctccttcttcctcacagtgaacacatggccagagaagtggatgctgtggatgttctcattgctgcccatgctcagcaggtaccacctgatcctctggtcctgggccatcaccaggccaggcagggtgtccatgatgtagccattgatggcatggaacctgtagttctccttgaaggtggggtcctccatctggatgttgcagggggccctgcagttcctctccatgttctcagtgaagtaccagctcttggtttcatcaaagatggtgaagaacagggcaaactcctgcacagtcacctgcctgccatgggcagggttcagggtgttggtgtggcacaccagcagggggccaatcaggccagagtgcacatccttctccaggtccacatcagagaagtaggcccaggccttgcagtcaaactcatccttggtgggggccatgtggtgctgcaccttccagaagtaggtcttggtttcattgggcttcacaaagttcttcctgggctcagccccctgcctctggtcctcctcatagctgatcaggctgctgtagaagctgtagggcctgctggcctggttcctgaaggtcaccatgatgttgtcctccacctcagccctgatgtaggggcccagcaggcccaggtgctcattcagctcccctctgtacaggggctgggtgaagctgccatcagtgaactcctggaacaccaccttcttgaactggggcacagagccagactgggccctgttcctcagcacatgggggctgctgctcatgccatagtcccacagcctctccacagcagcaatgaagtagtgcctggtcttcttctggaagctcctggggctctggttctcgtcctcgtcgtagatgtcaaagtcctccttcttcatctccacagagatggtgtcatcatagtcaatctcctcctggtcagactgcagggtggtattctctgggatggtggtggcattgaactgcttctgcctggtgctggggtgcctgctattctggctgaagctcctgggctcaatggcattgttcttgctcagcaggtaggcagagatgtcctcatagctgtcctcatagtagtccccagtgttcttgtcacagctggagactttcagcagggcagtcatgcccctgttcctgaagtcagagttgtggcagcccagaatccacaggccagggttctccatgctcatgaacacagtctccccagagaaggggaacagggtcagggtgtcctcatacaccatcttgtgcttgaaggtgtagccagagaagaacacagacaggaagtcagtctgggccccaatgctcaggatgtaccagtaggccacctcatgcaggcacacagacagctgcaggctgtcaaacacatagccattgatgctgtgcatgatgttgctggcctggaactcagggtcctccagctgcaccccagcagggttgggcaggaacctctggatgttctcagtcaggtaccagctcctgttctcatcaaacacagagaacaggatcacattcctcttgtcagacatgatctggttgcccctctggtccacagactccttgtagcagatcagcagggggccaatcaggccagaggccaggtccctctccatgttcacaaagctgctgtagtatctggtcaggcacctggggtcagacttggtggggccatcctccacagtcacagtccacttgtacttgaagatctccccaggcaggatggggaagtccttcaggtgcttcacccccttgggcagcctcctgctgtacaggggcctcacatcagtgatgccatgggggtagatgttgtagggcctgctggcctggttcttgaagatgatcagcagggtgtcccccacctccccatacagcagggggcccaggatgccagactcatgctggatggcctccctggtcttgaaggtttcatcagtgtaggccatgaacctgaccttcttgtacttcctgccaatcctctgggggccattgttcaggtactggctcttgtagctcctgtcatcaggggccagcaccaggggggcatagtcccagtcctcctcctcagcagcaatgtagtgcacccaggtcttggggtgcttcttggccacagacctgatctggatgaagctggggctgttgtcatcatcaaacctcaccacatccatctcagagtcagtcaggtcatcatcatagtcctcagcctcctcattgttcttcatcctcagctggggctcctcagggcagctgtccaccttcacataggcctccatgccatcatgctggtggctgctgatgtggcagaacagcaggaactggcccaggtccatcagcagggtctgggcagtcaggaaggtgatggggctgatctccaggctggcctgcctgtggttcctgaccaggaaggtgtggccctccaggaagatgctgtgcacctcaggggtggtgcccatgccaatcacatgccagtacacagacttcctgtggcagccaatcaggccaggcaggctcctgttcacatagccattcacagtgtgcatcttgggccaggccctggcagaggcagcatccctgtcctgcatcaggctgttcttggtttcagagtgccagctcttgccctcatcaaacacagcaaacagcaggatgaacttgtgcagggtctgggtcttctccttggccaggctgccctccctgcacaccagcagggccccaatcaggccagagttcaggtccttcaccaggtccacatggctcaggtagctgtaggtcaggcacagggggtcagaggccatggggccattctccttcagcacctgccacacataggtgtggctgcccccagggaacaccttgtcatcctccttctccctctggctggtctggtcatcatactcagccccctcagaggccttccagtagctcacccccacagcatgcaggctcacagggtggctggccatgttcttcagggtgatcaccacagtgtcatacacctcagcctggatggtggggcccagcaggcccatccaggggggcctgggcttggcaatgttgaacaggtggtcagtgaactccacaaacagggtcttcttgtacaccacagaggtgttgaaggggaagctcttgggcactctgggggggaacctggcatccacaggcagctcccccaggtcagactgcatgtagtcccagctcagctccacagcccccaggtagtatctcctggtggcagagaagcagaacctcagcaggcacaggaagaagcaggtgctcagctcaatctgcatggtggcggcgtttaaaccaacctgaaaaaaagtgatttcaggcaggtgctccaggtaattaaacattaataccccaccaaccaaccatcccttaaacccttacctcttcaggagcttgtggatctgtgtgacggcttctcctggtgaaggggcttttataccccctccttccaacccaggctgctgatccctgccaagctgactccaaacctgctgattctgattattgacttagtcaacaaaaggagaataagtaacctacacaaatatgaaccttgcctagggagattagagtatcggaacactcgctctacgaaatgtgcagacagacggggatcctctagagctacctgctgatcgcccggcccctgttcaaacatgtcctaatactctgtctctgcaagggtcatcagtagttttccatcttactcaacatcctcccagtgggtaccatggacttagctcctgtttgctccctgataactgggtgaccttggttaatattcaccagtagcttccccctatggacttagctcctgtttgctccctgataactgggtgaccttggttaatattcaccagtagcttccccctatggacttagctcctgtttgctccctgataactgggtgaccttggttaatattcaccagtagcttcccctgcggccgcgataagtagcatggcgggttaatcattaactacaaggaacccctagtgatggagttggccactccctctctgcgcgctcgctcgctcactgaggccgggcgaccaaaggtcgcccgacgcccgggctttgcccgggcggcctcagtgagcgagcgagcgcgcagctgcctgcaggcctaggagatccgaaccagataagtgaaatctagttccaaactattttgtcatttttaattttcgtattagcttacgacgctacacccagttcccatctattttgtcactcttccctaaataatccttaaaaactccatttccacccctcccagttcccaactattttgtccgcccacagcggggcatttttcttcctgttatgtttttaatcaaacatcctgccaactccatgtgacaaaccgtcatcttcggctacttt

SEQ ID NO: 1692 - DNA, 6250 bp, synthetic construct
  misc_feature 1..6250: note = Synthetic: reverse complement of SEQ ID NO: 147
  source 1..6250: mol_type = other DNA
cctgcaggcagctgcgcgctcgctcgctcactgaggccgcccgggcgtcgggcgacctttggtcgcccggcctcagtgagcgagcgagcgcgcagagagggagtggccaactccatcactaggggttcctcctgcaggtgtagttaatgattaacccgccatgctacttatctacgtagccatgctctagagccatagagcccaccgcatccccagcatgcctgctattgtcttcccaatcctcccccttgctgtcctgccccaccccaccccccagaatagaatgacacctactcagacaatgcgatgcaatttcctcattttattaggaaaggacagtgggagtggcaccttccagggtcaaggaaggcacgggggaggggcaaacaacagatggctggcaactagaaggcacagacaacaccacggaattatcagtgcccagcaacctagcccctgtccagcagcgggcaaggcaggcggcgatgagttctgccgtggcgatcgggagggggaaagcgaaagtcccagaaaggagttgacaggtggtggcaatgccccagccagtgggggttgcgtcagcaaacacagagcacaccacgccacgttgacggacaacgggccacaactcctctaaaagagacagcaaccaggatttatacaaggaggagaaaacgaaagccgtacgggaagcaatagctagatacagaggctataaagcagcatatccacacagcgtaaaaggagcaacatagttaagaatatcagtcaatctttcacaaattttgtaatccagaggttgattaacaggaacagagcgtaaataacgggaaagtttcttaacatgtttgtcttgtggcaatacacctgaactagtaattacatatccctaaaaatgtaaatgattgccccaccattttgttttattaacatttaaatgtatacccaaatcaagaaaaacagaacaaatatgggaataaatggcggtaagatgctcttaattaatcagtacaggtcctgggcctcacagcccagcacctccatcctcagggcaatctggtgcacccagctctgggggtgaatcctcaggtatctggtcagcaggggggggtccaggctgttcaccacaggggtgaagctgtcctggttgccctggaacaccttcaccttgccattctggaagaacagggtccactggtggccatcctggctgctgctgatcaggaactccttcacatacatgctggtcagcaggctcttcaccccctgggtggtcaccccagtcaccttcatggtcttctggaagtccacctgcagccactccttggggttgttgacctggggcctccaggcattgctcctgccctgcaggtgcagcctggccttgctggggctccaggtggcaaacatgttggtgaagtagctgctggcagtgatctgggcatcagagatggccttgctctccatgcccaggggcatgctgcagctgttcaggtcacagcccatcagctccatcctcagggtgctcctgatgctgtagtgggtggggtgcagcctgatgtatctggcaatgatgggggggttgaagatgttgtgcttgatgccagagctgtccacattgccaaagaacaccatcagggtgccagtgctgttgcccctgtaggtctgccacttcttgccatccaggctgtacatgatgatgaactggctgatgtacaggctgctgaacttctgcctggccccctgggtcttgatgccatggatgatcatgggggccagcaggtccaccttgatccagctgaagggctccttggtgctccaggcattgatgctgccagagtagtgcagcctggccagcttgggggcccactggccatactggccagaggcagtgatctggaagtccctgatgtggccagaggccatgcccaggggggtctggcacttgttgctgtacaccaggaacagggtgctcatgccagcatgcaggtgctccccaatcaggcactccaccctccagatgccagccttgctgggcagcatctccacagtctcaaacaccccagggtacaggttgtacagggccatcttgtactcctccttcttcctcacagtgaacacatggccagagaagtggatgctgtggatgttctcattgctgcccatgctcagcaggtaccacctgatcctctggtcctgggccatcaccaggccaggcagggtgtccatgatgtagccattgatggcatggaacctgtagttctccttgaaggtggggtcctccatctggatgttgcagggggccctgcagttcctctccatgttctcagtgaagtaccagctcttggtttcatcaaagatggtgaagaacagggcaaactcctgcacagtcacctgcctgccatgggcagggttcagggtgttggtgtggcacaccagcagggggccaatcaggccagagtgcacatccttctccaggtccacatcagagaagtaggcccaggccttgcagtcaaactcatccttggtgggggccatgtggtgctgcaccttccagaagtaggtcttggtttcattgggcttcacaaagttcttcctgggctcagccccctgcctctggtcctcctcatagctgatcaggctgctgtagaagctgtagggcctgctggcctggttcctgaaggtcaccatgatgttgtcctccacctcagccctgatgtaggggcccagcaggcccaggtgctcattcagctcccctctgtacaggggctgggtgaagctgccatcagtgaactcctggaacaccaccttcttgaactggggcacagagccagactgggccctgttcctcagcacatgggggctgctgctcatgccatagtcccacagcctctccacagcagcaatgaagtagtgcctggtcttcttctggaagctcctggggctctggttctcgtcctcgtcgtagatgtcaaagtcctccttcttcatctccacagagatggtgtcatcatagtcaatctcctcctggtcagactgcagggtggtattctctgggatggtggtggcattgaactgcttctgcctggtgctggggtgcctgctattctggctgaagctcctgggctcaatggcattgttcttgctcagcaggtaggcagagatgtcctcatagctgtcctcatagtagtccccagtgttcttgtcacagctggagactttcagcagggcagtcatgcccctgttcctgaagtcagagttgtggcagcccagaatccacaggccagggttctccatgctcatgaacacagtctccccagagaaggggaacagggtcagggtgtcctcatacaccatcttgtgcttgaaggtgtagccagagaagaacacagacaggaagtcagtctgggccccaatgctcaggatgtaccagtaggccacctcatgcaggcacacagacagctgcaggctgtcaaacacatagccattgatgctgtgcatgatgttgctggcctggaactcagggtcctccagctgcaccccagcagggttgggcaggaacctctggatgttctcagtcaggtaccagctcctgttctcatcaaacacagagaacaggatcacattcctcttgtcagacatgatctggttgcccctctggtccacagactccttgtagcagatcagcagggggccaatcaggccagaggccaggtccctctccatgttcacaaagctgctgtagtatctggtcaggcacctggggtcagacttggtggggccatcctccacagtcacagtccacttgtacttgaagatctccccaggcaggatggggaagtccttcaggtgcttcacccccttgggcagcctcctgctgtacaggggcctcacatcagtgatgccatgggggtagatgttgtagggcctgctggcctggttcttgaagatgatcagcagggtgtcccccacctccccatacagcagggggcccaggatgccagactcatgctggatggcctccctggtcttgaaggtttcatcagtgtaggccatgaacctgaccttcttgtacttcctgccaatcctctgggggccattgttcaggtactggctcttgtagctcctgtcatcaggggccagcaccaggggggcatagtcccagtcctcctcctcagcagcaatgtagtgcacccaggtcttggggtgcttcttggccacagacctgatctggatgaagctggggctgttgtcatcatcaaacctcaccacatccatctcagagtcagtcaggtcatcatcatagtcctcagcctcctcattgttcttcatcctcagctggggctcctcagggcagctgtccaccttcacataggcctccatgccatcatgctggtggctgctgatgtggcagaacagcaggaactggcccaggtccatcagcagggtctgggcagtcaggaaggtgatggggctgatctccaggctggcctgcctgtggttcctgaccaggaaggtgtggccctccaggaagatgctgtgcacctcaggggtggtgcccatgccaatcacatgccagtacacagacttcctgtggcagccaatcaggccaggcaggctcctgttcacatagccattcacagtgtgcatcttgggccaggccctggcagaggcagcatccctgtcctgcatcaggctgttcttggtttcagagtgccagctcttgccctcatcaaacacagcaaacagcaggatgaacttgtgcagggtctgggtcttctccttggccaggctgccctccctgcacaccagcagggccccaatcaggccagagttcaggtccttcaccaggtccacatggctcaggtagctgtaggtcaggcacagggggtcagaggccatggggccattctccttcagcacctgccacacataggtgtggctgcccccagggaacaccttgtcatcctccttctccctctggctggtctggtcatcatactcagccccctcagaggccttccagtagctcacccccacagcatgcaggctcacagggtggctggccatgttcttcagggtgatcaccacagtgtcatacacctcagcctggatggtggggcccagcaggcccatccaggggggcctgggcttggcaatgttgaacaggtggtcagtgaactccacaaacagggtcttcttgtacaccacagaggtgttgaaggggaagctcttgggcactctgggggggaacctggcatccacaggcagctcccccaggtcagactgcatgtagtcccagctcagctccacagcccccaggtagtatctcctggtggcagagaagcagaacctcagcaggcacaggaagaagcaggtgctcagctcaatctgcatggtggcggcgtttaaaccaacctgaaaaaaagtgatttcaggcaggtgctccaggtaattaaacattaataccccaccaaccaaccatcccttaaacccttacctcttcaggagcttgtggatctgtgtgacggcttctcctggtgaaggggcttttataccccctccttccaacccaggctgctgatccctgccaagctgactccaaacctgctgattctgattattgacttagtcaacaaaaggagaataagtaacctacacaaatatgaaccttgcctagggagattagagtatcggaacactcgctctacgaaatgtgcagacagacggggatcctctagagctacctgctgatcgcccggcccctgttcaaacatgtcctaatactctgtctctgcaagggtcatcagtagttttccatcttactcaacatcctcccagtgggtaccgtggacttagcccctgtttgctcctccgataactggggtgaccttggttaatattcaccagcagcctcccccggtggacttagcccctgtttgctcctccgataactggggtgaccttggttaatattcaccagcagcctcccccggtggacttagcccctgtttgctcctccgataactggggtgaccttggttaatattcaccagcagcctcccccgcggccgcgataagtagcatggcgggttaatcattaactacaaggaacccctagtgatggagttggccactccctctctgcgcgctcgctcgctcactgaggccgggcgaccaaaggtcgcccgacgcccgggctttgcccgggcggcctcagtgagcgagcgagcgcgcagctgcctgcagg

SEQ ID NO: 1693 - protein, 1460 aa, synthetic construct
  REGION 1..1460: note = Synthetic: protein from Fig. 12
QIELSTCFFLCLLRFCFSATRRYYLGAVELSWDYMQSDLGELPVDARFPPRVPKSFPFNTSVVYKKTLFVEFTDHLFNIAKPRPPWMGLLGPTIQAEVYDTVVITLKNMASHPVSLHAVGVSYWKASEGAEYDDQTSQREKEDDKVFPGGSHTYVWQVLKENGPMASDPLCLTYSYLSHVDLVKDLNSGLIGALLVCREGSLAKEKTQTLHKFILLFAVFDEGKSWHSETKNSLMQDRDAASARAWPKMHTVNGYVNRSLPGLIGCHRKSVYWHVIGMGTTPEVHSIFLEGHTFLVRNHRQASLEISPITFLTAQTLLMDLGQFLLFCHISSHQHDGMEAYVKVDSCPEEPQLRMKNNEEAEDYDDDLTDSEMDVVRFDDDNSPSFIQIRSVAKKHPKTWVHYIAAEEEDWDYAPLVLAPDDRSYKSQYLNNGPQRIGRKYKKVRFMAYTDETFKTREAIQHESGILGPLLYGEVGDTLLIIFKNQASRPYNIYPHGITDVRPLYSRRLPKGVKHLKDFPILPGEIFKYKWTVTVEDGPTKSDPRCLTRYYSSFVNMERDLASGLIGPLLICYKESVDQRGNQIMSDKRNVILFSVFDENRSWYLTENIQRFLPNPAGVQLEDPEFQASNIMHSINGYVFDSLQLSVCLHEVAYWYILSIGAQTDFLSVFFSGYTFKHKMVYEDTLTLFPFSGETVFMSMENPGLWILGCHNSDFRNRGMTALLKVSSCDKNTGDYYEDSYEDISAYLLSKNNAIEPRSFSQNSRHPSTRQKQFNATTIPENTTLQSDQEEIDYDDTISVEMKKEDFDIYDEDENQSPRSFQKKTRHYFIAAVERLWDYGMSSSPHVLRNRAQSGSVPQFKKVVFQEFTDGSFTQPLYRGELNEHLGLLGPYIRAEVEDNIMVTFRNQASRPYSFYSSLISYEEDQRQGAEPRKNFVKPNETKTTYFWKVQHHMAPTKDEFDCKAWAYFSDVDLEKDVHSGLIGPLLVCHTNTLNPAHGRQVTVQEFALFFTIFDETKSWYFTENMERNCRAPCNIQMEDPTFKENYRFHAINGYIMDTLGLVMAQDQRIRWYLLSMGSNENIHSIHFSGHVFTVRKKEEYKMALYNLYPGVFETVEMLPSKAGIWRVECLIGEHLHAGMSTLFLVYSNKCQTPLGMASGHIRDFQITASGQYGQWAPKLARLHYSGSINAWSTKEPFSWIKVDLLMIIHIKTQGARQKFSSLYISQFIIMYSLDGKKWQTYRGNSTGTGLMVFFGNVDSSGIKHNIFNPPIIARYIRLHPTHYSIRSTLRMELMGCDLNSCSMPLLMESKAISDAQITASSYFTNMFATWSPSKARLHLQGRSNAWRPQVNNPKEWLQVDFQKTMKVTGVTTQGVKSLLTSMYVKEFLISSSQDGHQWTLFFQNGKVKVFQGNQDSFTPVVNSLDPPLLTRYLRIHPQSWVHQIALRMEVLGCEAQDLY

SEQ ID NO: 1694 - DNA, 72 bp, synthetic construct
  misc_feature 1..72: note = Synthetic: HNF4_FOXA
  source 1..72: mol_type = other DNA
gggggaggctgctcgtaaacattaaccaaggtcaccccagttatcagaggagcaaagaggggcaaagtccac

SEQ ID NO: 1695 - DNA, 72 bp, synthetic construct
  misc_feature 1..72: note = Synthetic: Human_monoMut_ T64A
  source 1..72: mol_type = other DNA
gggggaggctgctggtaaacattaaccaaggtcaccccagttatcggaggagcaaagaggggcaaagtccac

SEQ ID NO: 1696 - DNA, 72 bp, synthetic construct
  misc_feature 1..72: note = Synthetic: Bushbaby_monoMut_T62A
  source 1..72: mol_type = other DNA
gggggaagctactggtgaatattaaccaaggtcaccccagttatcagaggagcaaagaggggcaaagtccac

SEQ ID NO: 1697 - DNA, 69 bp, synthetic construct
  misc_feature 1..69: note = Synthetic: ChineseTreeShrew_monoMut_T61A
  source 1..69: mol_type = other DNA
ggaggctgttcgtgaatattaaccaaggtcacctcagttatcagaggagcaaagaagggcaaagtccac

SEQ ID NO: 1698 - DNA, 72 bp, synthetic construct
  misc_feature 1..72: note = Synthetic: HNF4_FOXA_monoMut_A64T
  source 1..72: mol_type = other DNA
gggggaggctgctggtaaacattaaccaaggtcaccccagttatcagaggagcaaagaggggctaagtccac

1. A liver-specific nucleic acid regulatory element comprising a nucleic acid sequence having at least 93% identity to a sequence selected from the group consisting of: SEQ ID NOs: 1-80, 138, and 139.

2. The liver-specific nucleic acid regulatory element of claim 1, wherein the nucleic acid sequence has at least 94%, 95%, 96%, 97%,98% or 99% identity to a sequence selected from the group consisting of: SEQ ID NOs: 1-80, 138, and 139.

3-7. (canceled)

8. The liver-specific nucleic acid regulatory element of claim 3, wherein the nucleic acid sequence consists of a sequence selected from the group consisting of: SEQ ID NOs: 1-80, 138, and 139.

9.-21. (canceled)

22. A liver-specific nucleic acid regulatory element comprising a nucleic acid sequence selected from the group consisting of the sequences set forth in Table 10, Table 11, Table 12, and Table 13.

23. The liver-specific nucleic acid regulatory element of claim 22, wherein:
the element comprises at least two nucleic acid sequences selected from the group consisting of the sequences set forth in Table 10, Table 11, Table 12, and Table 13,
the element comprises three (3) nucleic acid sequences selected from the group consisting of the sequences set forth in Table 10, Table 11, Table 12, and Table 13, optionally wherein the three sequences are identical;
the element consists essentially of two (2) to ten (10) nucleic acid sequences selected from the group consisting of the sequences set forth in Table 10, Table 11, Table 12, and Table 13:
the element comprises a spacer placed between the nucleic acid sequences selected from the group consisting of the sequences set forth in Table 10, Table 11, Table 12, and Table 13: or the element comprises a nucleic acid sequence at least 95%, 96%, 97%, 98% or 99% identical to a nucleic acid sequence selected from the group consisting of:
(SEQ ID NO: 223)
GGGGGAGGCTGCTGGTGAATATTAACCAAGGTCACCCCAGTTATCGGAGG
AGCAAACAGGGGCAAAGTCCAC,
(SEQ ID NO: 1381)
GGGGGAAGCTACTGGTGAATATTAACCAAGGTCACCCAGTTATCAGGGAG
CAAACAGGAGCAAAGTCCAT,
(SEQ ID NO: 1073)
GGAGGCTGTTGGTGAATATTAACCAAGGTCACCTCCGTTATCGGAGGAGC
AAACAAGGGCTAAGTCCAC,
and
(SEQ ID NO: 1113)
GGAGGCTGTTGGTGAATATTAACCAAGGTCACCTCAGTTATCGGAGGAGC
AAACAAGGGCAAAGTCCAC.

24.-30. (canceled)

31. A liver-specific expression cassette comprising the liver-specific nucleic acid regulatory element of claim 1, and a liver-specific promoter operably linked to a transgene.

32. (canceled)

33. A liver-specific expression cassette comprising at least three repeats of a liver-specific nucleic acid regulatory element and a liver-specific promoter operably linked to a transgene,
wherein the liver-specific nucleic acid regulatory element comprises a nucleic acid sequence having at least 95% identity to any one of SEQ ID NOs: 81-137, and
wherein two or more nucleotides separate each liver-specific nucleic acid regulatory element.

34. The liver-specific expression cassette of claim 33, wherein:
between 2 and 30 nucleotides separate each regulatory element;
5 nucleotides separate each regulatory element;
11 nucleotides separate each regulatory element; or
30 nucleotides separate each regulatory element.

35.-37. (canceled)

38. The liver-specific expression cassette of claim 33, wherein the liver-specific expression cassette comprises two, three, four, or five repeats of the liver-specific nucleic acid regulatory element or wherein the liver-specific expression cassette comprises six, seven, eight, nine or ten repeats of the liver-specific nucleic acid regulatory element.

39.-41. (canceled)

42. The liver-specific expression cassette of claim 31, wherein the liver-specific promoter is selected from the group consisting of: a transthyretin (TTR) promoter, a minimal TTR promotor (TTRm), an AAT promoter, an albumin (ALB) promotor or minimal promoter, an apolipoprotein A1 (APOA1) promoter or minimal promoter, a complement factor B (CFB) promoter, a ketohexokinase (KHK) promoter, a hemopexin (HPX) promoter or minimal promoter, a nicotinamide N-methyltransferase (NNMT) promoter or minimal promoter, a carboxylesterase 1 (CES1) promoter or minimal promoter, a protein C (PROC) promoter or minimal promoter, an apolipoprotein C3 (APOC3) promoter or minimal promoter, a mannan-binding lectin serine protease 2 (MASP2) promoter or minimal promoter, a hepcidin antimicrobial peptide (HAMP) promoter or minimal promoter, and a serpin peptidase inhibitor, clade C (antithrombin), member 1 (SERPINC1) promoter or minimal promoter.

43. The liver-specific expression cassette of claim 42, wherein the promoter comprises a sequence selected from the group consisting of: SEQ ID NOs 210-216 and 217.

44. (canceled)

45. The liver-specific expression cassette of claim 31, wherein the transgene encodes a liver-specific therapeutic protein.

46. The liver-specific expression cassette of claim 45, wherein the liver-specific therapeutic protein is coagulation factor VIII (FVIII).

47. (canceled)

48. (canceled)

49. A vector comprising the liver-specific nucleic acid regulatory element of claim 1.

50. The vector of claim 49, wherein:
the vector is a viral vector or a non-viral vector,
the vector is a plasmid; or
the vector is a closed-ended DNA (ceDNA) vector.

51. (canceled)

52. (canceled)

53. A pharmaceutical composition comprising the vector of claim 49, and a pharmaceutically acceptable excipient.

54. A method of treating a liver-specific disease or disorder comprising transduction or transfection of the vector according to claim 49, into a subject.

55. The method of claim 54, wherein the subject is a human subject suffering from a genetic disorder.

56. (canceled)

57. (canceled)

58. A method of increasing expression capacity of a liver-specific enhancer element comprising the nucleic acid sequence CTAAG, comprising introducing a single nucleotide substitution (T to A) mutation such that the substitution results in the nucleic acid sequence comprising CAAAG.

59. A liver-specific enhancer element comprising a nucleic acid sequence selected from:
CAAAG; CAAAGT; CAAAGTC; GCAAAGT; GCAAAG;
or
GCAAAGTC.

60. The liver-specific expression cassette of claim 31, which comprises at least two liver-specific nucleic acid regulatory elements or which comprises at least three liver-specific nucleic acid regulatory elements.

61. The liver-specific expression cassette of claim 60, wherein two or more nucleotides separate each of the liver-specific nucleic acid regulatory elements.
